United States Patent Application Publication US 2023/0025039 A1 - sequence listing, part 3

SEQ ID NO: 5233 - protein, 60 aa, Artificial
  Synthetic
GGGGSGGGGSGGGGSGGGGSGGGGSGGGGSGGGGSGGGGSGGGGSGGGGSGGGGSGGGGS

SEQ ID NO: 5234 - protein, 32 aa, Artificial
  Synthetic
LEPGEKPYKCPECGKSFSQSGALTRHQRTHTR

SEQ ID NO: 5235 - protein, 20 aa, Artificial
  Synthetic
PKKKRKVEASSPKKRKVEAS

SEQ ID NO: 5236 - DNA, 27 bp, Artificial
  Synthetic
ggtggtagtggagggagcggcggttca

SEQ ID NO: 5237 - DNA, 72 bp, Artificial
  Synthetic
ggtggaggaggctctggtggaggcggtagcggaggcggagggtcgggtggtagtggagggagcggcggttca

SEQ ID NO: 5238 - DNA, 48 bp, Artificial
  Synthetic
tcgggatctgagacgcctgggacctcggaatcggctacgcccgaaagt

SEQ ID NO: 5239 - DNA, 192 bp, Artificial
  Synthetic
gtggataacaaatttaacaaagaaatgtgggcggcgtgggaagaaattcgtaacctgccgaacctgaacggctggcagatgaccgcgtttattgcgagcctggtggatgatccgagccagagcgcgaacctgctggcggaagcgaaaaaactgaacgatgcgcaggcgccgaaaaccggcggtggttctggt

SEQ ID NO: 5240 - DNA, 108 bp, Artificial
  Synthetic
ggtggttctgccggtggctccggttctggctccagcggtggcagctctggtgcgtccggcacgggtactgcgggtggcactggcagcggttccggtactggctctggc

SEQ ID NO: 5241 - protein, 12 aa, Artificial
  Synthetic
FWYHKMILVAGC

SEQ ID NO: 5242 - protein, 4 aa, Artificial
  Synthetic
FWYH

SEQ ID NO: 5243 - protein, 12 aa, Artificial
  Synthetic
WYHKREDCSTNQ

SEQ ID NO: 5244 - protein, 5 aa, Artificial
  Synthetic
HKRED

SEQ ID NO: 5245 - protein, 9 aa, Artificial
  Synthetic
VCAGSPTND

SEQ ID NO: 5246 - protein, 9 aa, Artificial
  Synthetic
IEVMYPPPY

SEQ ID NO: 5247 - DNA, 7440 bp, Artificial
  Synthetic
ggccgcaggaacccctagtgatggagttggccactccctctctgcgcgctcgctcgctcactgaggccgggcgaccaaaggtcgcccgacgcccgggctttgcccgggcggcctcagtgagcgagcgagcgcgcagctgcctgcaggggcgcctgatgcggtattttctccttacgcatctgtgcggtatttcacaccgcatacgtcaaagcaaccatagtacgcgccctgtagcggcgcattaagcgcggcgggtgtggtggttacgcgcagcgtgaccgctacacttgccagcgccctagcgcccgctcctttcgctttcttcccttcctttctcgccacgttcgccggctttccccgtcaagctctaaatcgggggctccctttagggttccgatttagtgctttacggcacctcgaccccaaaaaacttgatttgggtgatggttcacgtagtgggccatcgccctgatagacggtttttcgccctttgacgttggagtccacgttctttaatagtggactcttgttccaaactggaacaacactcaaccctatctcgggctattcttttgatttataagggattttgccgatttcggcctattggttaaaaaatgagctgatttaacaaaaatttaacgcgaattttaacaaaatattaacgtttacaattttatggtgcactctcagtacaatctgctctgatgccgcatagttaagccagccccgacacccgccaacacccgctgacgcgccctgacgggcttgtctgctcccggcatccgcttacagacaagctgtgaccgtctccgggagctgcatgtgtcagaggttttcaccgtcatcaccgaaacgcgcgagacgaaagggcctcgtgatacgcctatttttataggttaatgtcatgataataatggtttcttagacgtcaggtggcacttttcggggaaatgtgcgcggaacccctatttgtttatttttctaaatacattcaaatatgtatccgctcatgagacaataaccctgataaatgcttcaataatattgaaaaaggaagagtatgagtattcaacatttccgtgtcgcccttattcccttttttgcggcattttgccttcctgtttttgctcacccagaaacgctggtgaaagtaaaagatgctgaagatcagttgggtgcacgagtgggttacatcgaactggatctcaacagcggtaagatccttgagagttttcgccccgaagaacgttttccaatgatgagcacttttaaagttctgctatgtggcgcggtattatcccgtattgacgccgggcaagagcaactcggtcgccgcatacactattctcagaatgacttggttgagtactcaccagtcacagaaaagcatcttacggatggcatgacagtaagagaattatgcagtgctgccataaccatgagtgataacactgcggccaacttacttctgacaacgatcggaggaccgaaggagctaaccgcttttttgcacaacatgggggatcatgtaactcgccttgatcgttgggaaccggagctgaatgaagccataccaaacgacgagcgtgacaccacgatgcctgtagcaatggcaacaacgttgcgcaaactattaactggcgaactacttactctagcttcccggcaacaattaatagactggatggaggcggataaagttgcaggaccacttctgcgctcggcccttccggctggctggtttattgctgataaatctggagccggtgagcgtggaagccgcggtatcattgcagcactggggccagatggtaagccctcccgtatcgtagttatctacacgacggggagtcaggcaactatggatgaacgaaatagacagatcgctgagataggtgcctcactgattaagcattggtaactgtcagaccaagtttactcatatatactttagattgatttaaaacttcatttttaatttaaaaggatctaggtgaagatcctttttgataatctcatgaccaaaatcccttaacgtgagttttcgttccactgagcgtcagaccccgtagaaaagatcaaaggatcttcttgagatcctttttttctgcgcgtaatctgctgcttgcaaacaaaaaaaccaccgctaccagcggtggtttgtttgccggatcaagagctaccaactctttttccgaaggtaactggcttcagcagagcgcagataccaaatactgtccttctagtgtagccgtagttaggccaccacttcaagaactctgtagcaccgcctacatacctcgctctgctaatcctgttaccagtggctgctgccagtggcgataagtcgtgtcttaccgggttggactcaagacgatagttaccggataaggcgcagcggtcgggctgaacggggggttcgtgcacacagcccagcttggagcgaacgacctacaccgaactgagatacctacagcgtgagctatgagaaagcgccacgcttcccgaagggagaaaggcggacaggtatccggtaagcggcagggtcggaacaggagagcgcacgagggagcttccagggggaaacgcctggtatctttatagtcctgtcgggtttcgccacctctgacttgagcgtcgatttttgtgatgctcgtcaggggggcggagcctatggaaaaacgccagcaacgcggcctttttacggttcctggccttttgctggccttttgctcacatgtcctgcaggcagctgcgcgctcgctcgctcactgaggccgcccgggcgtcgggcgacctttggtcgcccggcctcagtgagcgagcgagcgcgcagagagggagtggccaactccatcactaggggttcctgcggcctctagagagggcctatttcccatgattccttcatatttgcatatacgatacaaggctgttagagagataattggaattaatttgactgtaaacacaaagatattagtacaaaatacgtgacgtagaaagtaataatttcttgggtagtttgcagttttaaaattatgttttaaaatggactatcatatgcttaccgtaacttgaaagtatttcgatttcttggctttatatatcttgtggaaaggacgaaacaccgagctgtggcggtggcaccagaatggattccgctgaagaagcctccgatttgtggggtgattacagcttttttatcgatctcgtaggtcttgaaaggagtgggaattggctccggtgcccgtcagtgggcagagcgcacatcgcccacagtccccgagaagttggggggaggggtcggcaattgatccggtgcctagagaaggtggcgcggggtaaactgggaaagtgatgtcgtgtactggctccgcctttttcccgagggtgggggagaaccgtatataagtgcagtagtcgccgtgaacgttctttttcgcaacgggtttgccgccagaacacaggaaacttaagcttgccaccatgtacccatacgatgttccagattacgcttatccctacgacgtgcctgattatgcatacccatatgatgtccccgactatgccggatcccttcaactgcctccacttgaaagactgacactgggatccgaattcgagaacatcaagaaaaccagcaacaaagaggtgtacagcatcgagcagtacgagggcgagaagaagtggtgcttcgccatcgtgctgaacagagcccagaccaacctggaagagaaccccaagctgttcgagcagaccctgaccagatttgagaagatcatgaagcaggactggttcaacgaggaaacgaagaagctgatctacgagaaagaggaagaaaacaaagtcaaagaggaaatccagatcgccgccagcgagcggctgaagaacctggcaaactacttcagcgcctacctgcacgcccctgactgcctgatcttcaaccggaacgacaccatccggatcatcatggaaaaggcctacgagaagtcccgcttcgaggccaagaagaagcagcaagaggacatctccatcgagttccccgagctgtttgaggaagaggacaagatcacctctgccggcgtggtgttcttcgtcagcttttttatcgagcggcggttcctgaaccggctgatgggctatgtgcagggcttcagaaagacagagggcgagtacaacatcaccagacaggtgttcagcaagtactgcctgaaggacagctacagcgtgcaggcccaggatcacgatgccgtgatgttcagagacatcctgggctacctgagcagagtgcccaccgagatctaccagcacatcaagctgacccggaagcggagccaggatcagctgagcgagagaaagaccgacaagttcatcctgttcgccctgaagtacctcgaggactacggactgaaggacctggccgattacaccgcctgctttgccagaagcaagatcaagagagagaacgaggacaccaaagagacagacggcaacaagcacaagttccaccgcgagaagcccgtggtggaaatccacttcgacaaagagaagcaggatcagttctacatcaagcggaacaacgtcatcctgaaggcccagaagaaaggcggccagagcaacgtgttccggatgggagtgtacgagctgaagtatctggtgctgctgagcctgctgggcaaagccgaagaggccatccagagaatcgaccggtacatcagcagcctgaagaaacagctgccctacctggataagatcagcaacgaagagatccagaagtccatcaactttctgcccagattcgtgcggagccggctgggactgctgcaagtggatgatgagaagagactgaaaacccggctggaatacgtgaaggccaagtggaccgataagaaagagggcagcagaaagctggaactgcaccggaagggcagagatatcctgcggtatatcaacgagagatgcgacagacccctgagccggaaagagtataacaacattctgaagttcatcgtgaacaaggacttcgccggcttctacaacgagctggaagaactgaagcggaccagacggctggacaagaacatcatccagaagctgagcggccacaccacactgaacgctctgcacgagcgagtgtgtgacctggtcctgcaagagctgggctctctgcagtccgagaacctgaaagagtacatcggactgatccccaaagaagagaaagaagtcaccttccgcgagaaagtggacagaatcctggaacagcctgtggtgtacaagggcttcctgagatacgagttcttcaaagaagataagaaatccttcgccaggctggtggaagaggctatcaagaccaagtggagcgacttcgacatccctctgggcgaagagtactacaacatccctagcctggacagattcgaccggaccaacaagaagctgtacgagacactggccatggaccggctgtgtctgatgatggccagacagtactacctgcggctgaacgagaagctggccgagaaggcacagcacatctactggaaaaaagaggacggccgggaagtcatcatcttcaagttccagaatccgaaagagcagaagaagtccttcagcatcaggttcagcatcctggactacaccaagatgtacgtgatggacgaccccgagttcctgagcaggctgtgggagtacttcatccctaaagaggccaaagagatcgactaccacaagcactacgccagagccttcgacaagtacaccaacctgcagaaagaaggcatcgacgccatcctgaaactggaaggcagaatcatcgagcgccggaagatcaagcccgccaagaactacatcgagtttcaagagattatgaatcggagcggctacaacaacgaccagcaggttgccctgaagagagtggcgaacgccctgctggcctacaacctgaacttcgagagagagcacctgaagcggttctacggcgtcgtgaagagagagggcatcgagaaaaaatggtccctgatcgtgggagggtcaggcggtagtcagctgcatttaccgcaggttttagctgacgctgtctcacgcctggtcctgggtaagtttggtgacctgaccgacaacttctcctcccctcacgctcgcagaaaagtgctggctggagtcgtcatgacaacaggcacagatgttaaagatgccaaggtgataagtgtttctacaggaacaaaatgtattaatggtgaatacatgagtgatcgtggccttgcattaaatgactgccatgcagaaataatatctcggagatccttgctcagatttctttatacacaacttgagctttacttaaataacaaagatgatcaaaaaagatccatctttcagaaatcagagcgaggggggtttaggctgaaggagaatgtccagtttcatctgtacatcagcacctctccctgtggagatgccagaatcttctcaccacatgagccaatcctggaagaaccagcagatagacacccaaatcgtaaagcaagaggacagctacggaccaaaatagagtctggtcaggggacgattccagtgcgctccaatgcgagcatccaaacgtgggacggggtgctgcaaggggagcggctgctcaccatgtcctgcagtgacaagattgcacgctggaacgtggtgggcatccagggatcactgctcagcattttcgtggagcccatttacttctcgagcatcatcctgggcagcctttaccacggggaccacctttccagggccatgtaccagcggatctccaacatagaggacctgccacctctctacaccctcaacaagcctttgctcagtggcatcagcaatgcagaagcacggcagccagggaaggcccccaacttcagtgtcaactggacggtaggcgactccgctattgaggtcatcaacgccacgactgggaaggatgagctgggccgcgcgtcccgcctgtgtaagcacgcgttgtactgtcgctggatgcgtgtgcacggcaaggttccctcccacttactacgctccaagattaccaagcccaacgtgtaccatgagtccaagctggcggcaaaggagtaccaggccgccaaggcgcgtctgttcacagccttcatcaaggcggggctgggggcctgggtggagaagcccaccgagcaggaccagttctcactcacgtaacgacctcgactgtgccttctagttgccagccatctgttgtttgcccctcccccgtgccttccttgaccctggaaggtgccactcccactgtcctttcctaataaaatgaggaaattgcatcgcattgtctgagtaggtgtcattctattctggggggtggggtggggcaggacagcaagggggaggattgggaagacaatagcaggcatgctggggatgcggtgggctctatgg

SEQ ID NO: 5248 - DNA, 7439 bp, Artificial
  Synthetic
ggccgcaggaacccctagtgatggagttggccactccctctctgcgcgctcgctcgctcactgaggccgggcgaccaaaggtcgcccgacgcccgggctttgcccgggcggcctcagtgagcgagcgagcgcgcagctgcctgcaggggcgcctgatgcggtattttctccttacgcatctgtgcggtatttcacaccgcatacgtcaaagcaaccatagtacgcgccctgtagcggcgcattaagcgcggcgggtgtggtggttacgcgcagcgtgaccgctacacttgccagcgccctagcgcccgctcctttcgctttcttcccttcctttctcgccacgttcgccggctttccccgtcaagctctaaatcgggggctccctttagggttccgatttagtgctttacggcacctcgaccccaaaaaacttgatttgggtgatggttcacgtagtgggccatcgccctgatagacggtttttcgccctttgacgttggagtccacgttctttaatagtggactcttgttccaaactggaacaacactcaaccctatctcgggctattcttttgatttataagggattttgccgatttcggcctattggttaaaaaatgagctgatttaacaaaaatttaacgcgaattttaacaaaatattaacgtttacaattttatggtgcactctcagtacaatctgctctgatgccgcatagttaagccagccccgacacccgccaacacccgctgacgcgccctgacgggcttgtctgctcccggcatccgcttacagacaagctgtgaccgtctccgggagctgcatgtgtcagaggttttcaccgtcatcaccgaaacgcgcgagacgaaagggcctcgtgatacgcctatttttataggttaatgtcatgataataatggtttcttagacgtcaggtggcacttttcggggaaatgtgcgcggaacccctatttgtttatttttctaaatacattcaaatatgtatccgctcatgagacaataaccctgataaatgcttcaataatattgaaaaaggaagagtatgagtattcaacatttccgtgtcgcccttattcccttttttgcggcattttgccttcctgtttttgctcacccagaaacgctggtgaaagtaaaagatgctgaagatcagttgggtgcacgagtgggttacatcgaactggatctcaacagcggtaagatccttgagagttttcgccccgaagaacgttttccaatgatgagcacttttaaagttctgctatgtggcgcggtattatcccgtattgacgccgggcaagagcaactcggtcgccgcatacactattctcagaatgacttggttgagtactcaccagtcacagaaaagcatcttacggatggcatgacagtaagagaattatgcagtgctgccataaccatgagtgataacactgcggccaacttacttctgacaacgatcggaggaccgaaggagctaaccgcttttttgcacaacatgggggatcatgtaactcgccttgatcgttgggaaccggagctgaatgaagccataccaaacgacgagcgtgacaccacgatgcctgtagcaatggcaacaacgttgcgcaaactattaactggcgaactacttactctagcttcccggcaacaattaatagactggatggaggcggataaagttgcaggaccacttctgcgctcggcccttccggctggctggtttattgctgataaatctggagccggtgagcgtggaagccgcggtatcattgcagcactggggccagatggtaagccctcccgtatcgtagttatctacacgacggggagtcaggcaactatggatgaacgaaatagacagatcgctgagataggtgcctcactgattaagcattggtaactgtcagaccaagtttactcatatatactttagattgatttaaaacttcatttttaatttaaaaggatctaggtgaagatcctttttgataatctcatgaccaaaatcccttaacgtgagttttcgttccactgagcgtcagaccccgtagaaaagatcaaaggatcttcttgagatcctttttttctgcgcgtaatctgctgcttgcaaacaaaaaaaccaccgctaccagcggtggtttgtttgccggatcaagagctaccaactctttttccgaaggtaactggcttcagcagagcgcagataccaaatactgtccttctagtgtagccgtagttaggccaccacttcaagaactctgtagcaccgcctacatacctcgctctgctaatcctgttaccagtggctgctgccagtggcgataagtcgtgtcttaccgggttggactcaagacgatagttaccggataaggcgcagcggtcgggctgaacggggggttcgtgcacacagcccagcttggagcgaacgacctacaccgaactgagatacctacagcgtgagctatgagaaagcgccacgcttcccgaagggagaaaggcggacaggtatccggtaagcggcagggtcggaacaggagagcgcacgagggagcttccagggggaaacgcctggtatctttatagtcctgtcgggtttcgccacctctgacttgagcgtcgatttttgtgatgctcgtcaggggggcggagcctatggaaaaacgccagcaacgcggcctttttacggttcctggccttttgctggccttttgctcacatgtcctgcaggcagctgcgcgctcgctcgctcactgaggccgcccgggcgtcgggcgacctttggtcgcccggcctcagtgagcgagcgagcgcgcagagagggagtggccaactccatcactaggggttcctgcggcctctagagagggcctatttcccatgattccttcatatttgcatatacgatacaaggctgttagagagataattggaattaatttgactgtaaacacaaagatattagtacaaaatacgtgacgtagaaagtaataatttcttgggtagtttgcagttttaaaattatgttttaaaatggactatcatatgcttaccgtaacttgaaagtatttcgatttcttggctttatatatcttgtggaaaggacgaaacaccgtaatgcctggcttgtcgacgcatagtctggctgaagaagcctccgatttgtggggtgattacagcttttttatcgatctcgtaggtcttgaaaggagtgggaattggctccggtgcccgtcagtgggcagagcgcacatcgcccacagtccccgagaagttggggggaggggtcggcaattgatccggtgcctagagaaggtggcgcggggtaaactgggaaagtgatgtcgtgtactggctccgcctttttcccgagggtgggggagaaccgtatataagtgcagtagtcgccgtgaacgttctttttcgcaacgggtttgccgccagaacacaggaaacttaagcttgccaccatgtacccatacgatgttccagattacgcttatccctacgacgtgcctgattatgcatacccatatgatgtccccgactatgccggatcccttcaactgcctccacttgaaagactgacactgggatccgaattcgagaacatcaagaaaaccagcaacaaagaggtgtacagcatcgagcagtacgagggcgagaagaagtggtgcttcgccatcgtgctgaacagagcccagaccaacctggaagagaaccccaagctgttcgagcagaccctgaccagatttgagaagatcatgaagcaggactggttcaacgaggaaacgaagaagctgatctacgagaaagaggaagaaaacaaagtcaaagaggaaatccagatcgccgccagcgagcggctgaagaacctggcaaactacttcagcgcctacctgcacgcccctgactgcctgatcttcaaccggaacgacaccatccggatcatcatggaaaaggcctacgagaagtcccgcttcgaggccaagaagaagcagcaagaggacatctccatcgagttccccgagctgtttgaggaagaggacaagatcacctctgccggcgtggtgttcttcgtcagcttttttatcgagcggcggttcctgaaccggctgatgggctatgtgcagggcttcagaaagacagagggcgagtacaacatcaccagacaggtgttcagcaagtactgcctgaaggacagctacagcgtgcaggcccaggatcacgatgccgtgatgttcagagacatcctgggctacctgagcagagtgcccaccgagatctaccagcacatcaagctgacccggaagcggagccaggatcagctgagcgagagaaagaccgacaagttcatcctgttcgccctgaagtacctcgaggactacggactgaaggacctggccgattacaccgcctgctttgccagaagcaagatcaagagagagaacgaggacaccaaagagacagacggcaacaagcacaagttccaccgcgagaagcccgtggtggaaatccacttcgacaaagagaagcaggatcagttctacatcaagcggaacaacgtcatcctgaaggcccagaagaaaggcggccagagcaacgtgttccggatgggagtgtacgagctgaagtatctggtgctgctgagcctgctgggcaaagccgaagaggccatccagagaatcgaccggtacatcagcagcctgaagaaacagctgccctacctggataagatcagcaacgaagagatccagaagtccatcaactttctgcccagattcgtgcggagccggctgggactgctgcaagtggatgatgagaagagactgaaaacccggctggaatacgtgaaggccaagtggaccgataagaaagagggcagcagaaagctggaactgcaccggaagggcagagatatcctgcggtatatcaacgagagatgcgacagacccctgagccggaaagagtataacaacattctgaagttcatcgtgaacaaggacttcgccggcttctacaacgagctggaagaactgaagcggaccagacggctggacaagaacatcatccagaagctgagcggccacaccacactgaacgctctgcacgagcgagtgtgtgacctggtcctgcaagagctgggctctctgcagtccgagaacctgaaagagtacatcggactgatccccaaagaagagaaagaagtcaccttccgcgagaaagtggacagaatcctggaacagcctgtggtgtacaagggcttcctgagatacgagttcttcaaagaagataagaaatccttcgccaggctggtggaagaggctatcaagaccaagtggagcgacttcgacatccctctgggcgaagagtactacaacatccctagcctggacagattcgaccggaccaacaagaagctgtacgagacactggccatggaccggctgtgtctgatgatggccagacagtactacctgcggctgaacgagaagctggccgagaaggcacagcacatctactggaaaaaagaggacggccgggaagtcatcatcttcaagttccagaatccgaaagagcagaagaagtccttcagcatcaggttcagcatcctggactacaccaagatgtacgtgatggacgaccccgagttcctgagcaggctgtgggagtacttcatccctaaagaggccaaagagatcgactaccacaagcactacgccagagccttcgacaagtacaccaacctgcagaaagaaggcatcgacgccatcctgaaactggaaggcagaatcatcgagcgccggaagatcaagcccgccaagaactacatcgagtttcaagagattatgaatcggagcggctacaacaacgaccagcaggttgccctgaagagagtggcgaacgccctgctggcctacaacctgaacttcgagagagagcacctgaagcggttctacggcgtcgtgaagagagagggcatcgagaaaaaatggtccctgatcgtgggagggtcaggcggtagtcagctgcatttaccgcaggttttagctgacgctgtctcacgcctggtcctgggtaagtttggtgacctgaccgacaacttctcctcccctcacgctcgcagaaaagtgctggctggagtcgtcatgacaacaggcacagatgttaaagatgccaaggtgataagtgtttctacaggaacaaaatgtattaatggtgaatacatgagtgatcgtggccttgcattaaatgactgccatgcagaaataatatctcggagatccttgctcagatttctttatacacaacttgagctttacttaaataacaaagatgatcaaaaaagatccatctttcagaaatcagagcgaggggggtttaggctgaaggagaatgtccagtttcatctgtacatcagcacctctccctgtggagatgccagaatcttctcaccacatgagccaatcctggaagaaccagcagatagacacccaaatcgtaaagcaagaggacagctacggaccaaaatagagtctggtcaggggacgattccagtgcgctccaatgcgagcatccaaacgtgggacggggtgctgcaaggggagcggctgctcaccatgtcctgcagtgacaagattgcacgctggaacgtggtgggcatccagggatcactgctcagcattttcgtggagcccatttacttctcgagcatcatcctgggcagcctttaccacggggaccacctttccagggccatgtaccagcggatctccaacatagaggacctgccacctctctacaccctcaacaagcctttgctcagtggcatcagcaatgcagaagcacggcagccagggaaggcccccaacttcagtgtcaactggacggtaggcgactccgctattgaggtcatcaacgccacgactgggaaggatgagctgggccgcgcgtcccgcctgtgtaagcacgcgttgtactgtcgctggatgcgtgtgcacggcaaggttccctcccacttactacgctccaagattaccaagcccaacgtgtaccatgagtccaagctggcggcaaaggagtaccaggccgccaaggcgcgtctgttcacagccttcatcaaggcggggctgggggcctgggtggagaagcccaccgagcaggaccagttctcactcacgtaacgacctcgactgtgccttctagttgccagccatctgttgtttgcccctcccccgtgccttccttgaccctggaaggtgccactcccactgtcctttcctaataaaatgaggaaattgcatcgcattgtctgagtaggtgtcattctattctggggggtggggtggggcaggacagcaagggggaggattgggaagacaatagcaggcatgctggggatgcggtgggctctatgg

SEQ ID NO: 5249 - DNA, 6292 bp, Artificial
  Synthetic
cgggcctggtttttatttcgtcaatcgagcgactaagaaatcttcaaaggcgcttaaatccttccataccgtggcacagttaatggttttggctttgttatctattacggtgtatccatagtcggtaacccgaatgccgagtttttcgggctcattttagacatttgcatctatgccgccggcagcgctgaaggttttttcggagctaattgagtattcagcataaatgttgaacggttttgccaatgcgggtactatgatgttgatgctaacgttgataaatacaaatgtgatggtccctcccatagggcctgtcggcctggactatatcgcaggagccgtcagggcagccgggaaccaggcagacgtagttgatttatgtcttgctgatgacccgtcaaagactctccagggctatttcgctacgcacagcccgcaattggtgggggtctcttttcgcaatgtggacgattctttctggccaagcgcccggtggttcgtccccgacctggctgacactatccgtacgatacgaagtatgacggatgcaccaattgtagttggcggcgttggcttttccattttttccgagcgaatcgtcgaatataccggcgctgactttgggattcggggcgacggagagcaggcaatagtttcacttcttaatcagctgcagcggccggaacggcttgaacgcatagatgggttagtccggcggcgcgacggagttattcacagcaaccgaccagcgtggcctgcaccgctttctttgcgcaccgaacgtgatgcgattgataacctcgcttacttcaaaaaaggaggcagtgtggtgtggagaccaaacggggctgtaaccgccgatgcctatattgtgccgacccgctggctaagggtgcggcagtcaggccgagggccccgtcggaggtcgccgatgaggtccagtctctaataggcaagggaatagaagtattgcatttgtgcgactctgagttcaacatctctcaaagccacgcctatgcggtctgcgaagagttcagccgtcgctcatttgcgaaaaaggtgcgctggtacacatatatggcggtggtgccattcgatgccgagcttgccggggctatgagcagagcgggctgtgtcggtatcgactttaccggcgactctgcgtgcccatcaattctaaagacctatcgccagcggcatcataaagaagaccttgcctcggcggtgcgtttgtgccgtgctaacggcataacggttatgatagacctgctgtttggcggcccgggtgaaacgccggaaacggtcgcagagacaatagatttcattaagcaaattgacccggattgcgcaggggctccgctcggtataagaatctaccccggcaccgaaatggcccgaatagtggcaaacgaaggcccaccggaaacgaacccgaacgttcaccgaaagtacgaggggcctgtggatttcttcaaaccaacttactatatatctgaagccctcggtgagcagccggccgggcttatcaaggatttgatttcggcagatgaaagattctttgagccgatgccggaaatagccccggaggctctaaaaagtagccagtccaccgaccacaattacaatgataataccgaacttgtagaagcaatcagcaaaggtgcacgcggggcatattgggatatactgcgcaagcttcgctgcgactaagcagcttatggtagtagatgattcccgcctgcgggagattggcccgaatcctgaggaatttgttagaagcggatgcaatgttgatttttggggtaaaaacgggggcagggggatttggtccccggtttgaggattccgagaagcccacccgtagggatctccgctcccttagggataaattcgcttcgagtttgaaattggtccccggtttgaggattccgagaagctcacccgtagtgatctccgcttcgcttcggctttgtttgggtttgttttccccgcgtctgcgaagtggttcattttcataatcctttataacatataagtttacgttcattttgggctttcggcaaattgggtttgaattgggtttgtttttttggactgcgaaatcatctttttttctgtaaacctttgttataagagagtttacattcatttgggcatttagtaaattgggtttgattggctttgaattgggtttgttttcaccaagtgtccaattggatttattttcataatcctttgtattatatggatttacgttcatttgagcatcagaaaattggctttgttttgcataaaaagggctgatttgtagaggactctttacagttgtagagggcaagttagttaagagtgagctaaagtgcctaaagtgaactaaagttggattctcgattctcgtatagcgtatagcgtatttcacggttattcaccattcattaaggaataaatttgattaggcctgctggcccctccggcgattagtaaatggttctcggcggcaaaacaacgcgcctctataattgggcgaacatgcacgtttgagtcgaaaattggtgctttcttgacaggataaacaggagtaactcgttgtgagaaaaggagtaaaattttttttcaattttccgattttaggttccaactacctgcacttttgattgaaaaatcacaaatgtcttgcctattttaacgcagtttttcgtcgaaacgtcagcgaactaggaaaataggcgatttctgggggaaaacaaataaaaaatgcacaaaagtgacaaaaaaacggccaaaaaagtgctttttttggctgcctttaccccgtgagatgatttaccaaaccttcctctgctattcctatgcaagtttgctcagggctggtgtgaatactataaaaatttgtgctgtaatcactccacaaatcggaggcttcttcagcgtggaaattctggaggccaaaatgaaatacgctgtaatcaccccacaaatcggaggcttcttcagcttcactacctctcaaatcgcccaactatacgctgtaatcaccccacaaatcggaggcttcttcagctcgcaagtcccgtccacgcacaaagtttgagctgtaatcaccccacaaatcggaggcttcttcagcatgagcttttggttgtgctggatatgccagctgtaatcaccccacaaatcggaggcttcttcagcacaaaacggttcaacaaggtcgaagaactagctgtaatcaccccacaaatcggaggcttcttcagcttctgcggagtctttcgccggtgttcaaatgctgtaatcaccccacaaatcggaggcttcttcagcctatcctttataatacattttcctatatagatttacaatacaaaacccacgacaaaactgacttcttcttttgaatcatgccgtattataacacttttttacactatcaaagaccactttttttctattccttctcttttcacgaccccatagaatctcttcagatgttccctctcaaaattgagattatagtgcaaaagcgcatttcgcacccgctttaaagcaacctgttgatcattattataaccgcttctattcattatctcctgaaattctatataattttttgctggtttaatctttcttcgttcgataatccttccttcaagctttagtattgcatcgattccctctttttgaaggtttgtatatttgtcgaacgcccttgcatagtgcttatggtagtctatttcttttgcttcttttgggataaaatattcccaaagtctgcttaaaaattcaggatcgtccattacatacatctttgtataatccaagatcgaaaagcgtatcgaaaaactcttcttttgctcttttggattttggaatttgaaaataatcacttctctgccatcttccttcttccaatagatatgctgtgccttttctgcaagtttttcgttcaatctgagataatattgccttgccatcataaggcaaagtctgtccattgccagtgtttcatatagcttcttgtttgttctgtcaaatcgatcaagagatgggatgttataatactcttcaccaagaggaatatcaaaatccgaccactttgtcttaattgcttcttcaacaagtctggcaaaactctttttgtcttctttgaagaattcgtatctcaaaaatcccttataaacaaccggctgttccaaaatcctatctaccttttctctaaaagttacctctttttcttctttaggtatcagcccaatatattccttgagattctccgattgcaaactgcccagttcttgtagaaccaaatcacataccctttcatgaagtgcattgagcgttgtatgcccggaaagcttctggataatatttttgtctaatcgtctggttcttttcagttcttcaagttcattataaaatccggcgaagtctttgttcactataaactttaaaatattattatattccttcctgctaagtggcctatcgcatcgctcgttgatatatctgagtatatcccttccttttcgatgtagttcaagcttcctcgatccctcttttttatccgtccacttggccttaacatattccaatcgagtctttaaccttttctcatcatcaacctgtaaaagacctagtcttgaacgtacgaatcttggaaggaagtttatagatttttgaatctcctcattacttattttatctaaataaggcaactgcttctttaaactactaatatagcggtcaattctttgaattgcctcttcggcttttcccaatagactcaaaagaacaagatatttaagttcataaactcccatcctgaatacgttggactgtccaccttttttttgagccttcagaataacattatttcgtttaatataaaattggtcttgcttctctttgtcaaaatgaatctcgactaccggcttttccctgtgaaatttgtgtttgttaccatctgtctctttcgtatcttcgttctcccttttaattttacttcttgcaaaacatgctgtgtagtctgccaaatccttaagtccataatcctcaagatatttcagtgcaaataatatgaacttgtccgtctttctttcgctcaactgatcctggcttctctttcgagttagtttgatatgctgatatatctcagtgggaactcgggacaggtatccgagaatatccctgaacataactgcatcatggtcctgcgcctgaaccgaataactatccttaagacaatatttggaaaaaacttgccgtgttatattatattcaccctctgtttttctaaacccttggacatatcccattaagcgatttaaaaatcttctttcaataaaaaatgagacaaagaatactacacctgctgatgttatcttatcttcttcttcaaataactctggaaattcaatcgaaatatcttcttgttgttttttcttcgcttcaaaacggctcttttcgtatgctttttccataattatccttatggtgtcatttcgattgaatatcaggcagtcaggcgcgtgaagataatgtgagaaataattccttaaattctttagtctttcactggccgctatttgaatttcttcttttactttgttttcctcttctttttcataaatcagtttttttgtttcctcattaaaccaatcctgtttcatgattttttcaaatcttgtaagtgtttgctcaaataactttggattttcctctaaatttgtttgtgctctattaagaactattgcaaaacaccactttttttctccttcatattgctcgatagaatacacttctttattgcttgttttttttatattttcaaactccatatttttaatccccgatcttcttactaatataaagtcaaagtggtgcgaaatatcgcaccctaccctctgcctgcgcaggaaagaccaacggacgattcgatgcagtttgagctgccaggtgcttttatcattcaaggggtaaaatagcagaaaagccttaatgtgtcaaggggattttagatttactatttccaatttacgattttggattgagattgcttcggcctaaaagacaggcctcgcaatgacccccttagagttgaaagcactctaaacaagggggcaggcggggggaatatcgaatatcgaatctgaatgtccaatgtcgaagtgcaactgcgcgggaatgacaggtcggcagatttatttaattctgtggccagatccctccgcttcgtccacctgcggtggacttcggtcgggatgacactgggggtgtgccattgctccgctcg

SEQ ID NO: 5250 - DNA, 7806 bp, Artificial
  Synthetic
gacataaagacccaatggtggcgtatgggcttggcatacgtctgatgtttcatcagaaaatcctttctggaggctcttgacttatggaatgaaatgccgataatgatattaaccggattccgttccggcctctaaaacttgcttccgtgagttttagagggttcacaatacacggggctgctctctcgtaaagggcagccctactcttttggttcatcctgtttgtgtggggtataaagctttaaaaatccttcaataaaggttatatcttcagagtttaacttgccatagattaccaaagtagcgtttccgctgggtaggggtattgaagtgggtgttgaaccagtcgaatcgccatttttagagctataagagggggtcggttgcattggcggcgatcccgcttcatattcttccatttcttcttttactccattaacttcagtctttcctaattgttctttgataaacatatttgtgtctcgaaagcattcgattgtcgtttgcgcaccttcatctgtgaatccacgttgcttgagtgaccatataagggcatcgtccgagggtaagttttcggtataactttgatataactcatcaaatatggtaggtgacttagcacatctctctaacgcttcttttctttctaatgaattatgaggagcttctgttattataaaagcatcctccgaaataccaaccttacccttttggtaacgaataagtccatattgagccatagcagctaatattgtaagagaacgaccgtgtagcctattataaccccataccttaactgcaatctcttttgccacaaatgcctttttttccctctcatacaatgcccgtacatttttaacgctttctcgcaagctgatacacggataccgtgggctacgtggcctatatttccttcttttctgttgttttgtttcaatttttttgtctttttgtcctttttgttcattcataatatttacccttaaattttctggtcttttatatatcatcgacaaccaccgcgtgaaatacaagagaaatattacttttttcgtgaaatttatgaaattctttgtgataaagtgttgccggagagtaatgtgctgttataacagataaaaagccccgctggggccttgcaaacgacccaacggggcaaaatggcgggttagctgagctgctgaaataaacctcgtgtttcttatttcgagtgccccttcggctctgctccccccttcgctatcctccttcgccaaggctacgaaagaaccagctacggagggcaggcagggcttcggctaattcaggacggcatccgtaaactttaaattatcagattttcgtctgcttgtcatgaagaaataatggtggggcaagcccaccctacgattttggtgtttgtcgcgtattatccgggaaatccgggctaagacaacgccaatcaggttaatacactgacggcttcggcgattagctcgcgtatcggcagatgctgtgggcagcgagcttccgcaagtctgtaatcggtggtgagcagtttgtttctaaccttgcggggaatttgagcgaaaagccctcttgccctatcctggtcgctgtagctgttgtagtacatcaaataccgcataatgtcactgacataaggtgtatcgggcagggctgaatcgcagatgtatgcacagccggcacaataaccgctgcaggtcgcctccgcgtatttcttgaaaacgtctaaatcctgctgagtgagttttgttttgttcagcacggcatcgacgtttgtagttaaaagagatatattctgcatcccgacgcagactgcgctgaaccttttatcttgcagcacaacctttatctttgcctgttcttcggtgaaaccccgcttctggaagtgaccgaggagtttcttatcctgttcggtttcaacctcctgaagacgtctgaccccgcgggagaaagccttcatagcagtaagacctatgcccgctttgtggcaggcttcaatagcagcctgcattggagcatcctgcatgactcggaagttgtaaagtgtcgttattgcatcaatccagtcgagcttggctgcagcggcgaggcatctggccatattcgagtgggtgctgaacccgaaaaaccgtatcagcccgcgcttctttgcatctttggcccactgttttaattcatccgtcaactgtgcagggtcggataagccgtgaaaagcatagtacaaatcgacgtatttggtgttcattcttttcagcgaggcctgaagacgctcttccaccttctcggcggttattgccccccaaaaaatcgccgccttgcttacaatgaatagtttctttctggccttcgggttcttcgagaggaatttacctatcccgagctctgcgtttccacgcccatagttgtaagctgtatcccaataggtaaccccccattcgagggcttttcttaaaacgatttgcttatcaataaaactaaagtctccgcccagagacaggcaggagacctcgacgcctattttgcctaactttcgtttcggcatctgtgggattttggttttttttggttttggtggagcattagggtcgctggtcttcggttcgcctgggccggctgttgcttcagccgaaccccgtattaaatacggggccaatccagtcgctcccatcgttttcaaaaaattccttctgttgattttgttgtgtttttccttcatcatattaacctccgaaagcgattaatgtttaagtaataactttctatctgcacttcttgtttcattttccgcagagacccttatagcttttttgccgcttacggggcattcgtgctcacaaactccgcagccgatacatttttcaatatcaacgagaggtctttgcaggcgaacctgaagctcaattttgctgcctgcagcggggattttttcgaattgctcatcaggtgaaattacgatggtgttttcggtgtttgctgcgatttttctgcgttcatcaccttcgacggcacaataataatcgccggtggcaaatttggcaggcacaatgttctcttcaacttccacagtattatccgtggctttctttacagtcaaaatgccatctcttattgtattgaaacattcctccgtataaattgcctttgggctaagcgggcagttttcttcgcagactatgcagggcttatccatcgcccagggaaggcacctgttttggtcaacaaaagcggtgcccagcttgattggcccgacgtcggcaaactcgtcggttccgagtttttccgcaagtgtaatcggacgaatggccgaggtcgggcaaacctgcccgcaggccacgcagtttagttgacagccgcttgagccgattcgattgttcagcacgggggtccagagattttccagtcctccctgtatgccgcctggctggataacatttgtggggcacacgcgcatacattggccgcacttgatacatctctttaagaattcctcttccgacaatgcgcctggcgggcgaatgaccttatggtaccagttgctgccgagtttgttgctcagcctgaccgccggtactgcaatgatgccgccggtgagtgaaagcacaaagcccctgcgagagatgtccggatttgtgatttcgcctgccagtgacggttttgtctggtaactgattagttcgtccttgcagtccctgcggcaattaaaacaaagtacgcattcacttattcttatatttccgctgggctggcaggcgccttcgcaggcccgctcgcacaatttgcaattggtgcattcgctccggttctggctgattcgccatatagcgaatctgccgaggatgccgaataatgcgccgagcggacaaatgaatctgcagtagaatcgggggatagtcaggttaagcaagaccgccgtcaggaatatcgttagtatcagccatgcgccctcgtaaaagcgtgccgttactgaggcgaggttggcgggtctatcagcaaggggcaataatacgaggttaaaagagcgggttatcaacggtatagggtcgagcaggcccgtttgcaaggtaacccctatcgatggaaacgcagccataaaaagaaagaatatgagaatgaggtattttatgcactgggcttttcggtatttgttgagctggattttttgtggtgcggttttttttcgattgcctaaaaagccgacaaagtgatgcaatgagccgaagggacagacccaactgcagaagaaccgcccgaatattattgtcaatataatcgtagccagtgcccataaaagaggccagtagagggtgtgtgtagttaatattgtcccgattgccaccagcgggtcgagctgtaaaaaccagttaacgggccagccccgcaactgccacaatttctcgcctacggtggcgactatgcagaaccaggcgaacatcgagaaaaagaaggcctggcttatttgtctaactgttacaatcttcatacttacacttttagcttaccgtggcggttattggtttgagtgattcataatcagtggttccggcatcggcgatttgggctttggcaaggtaaggcaggtccgaggccttcaaatttagaagactgcagccataggcatcggccgccaccatatcacaacttgcaatcagcgtatttgcgcgtctcaaatcttcgacagagcctcccgttgggccattggtcatcataacttcagtgccgtccagtataaccaacgtcggctttaccatcatagccagctcggcaatgattgtgttaatatcctggtgaaagatattgcggcgtccgcccaaaaggccgtaccagtttttcatcgacatagaagcgccggccctggcgtggtgtttgaccggggtgataccaatcagtttgttgaccttctcaaacggcccgaagaagataggccaatttttaatgagtttgccacgttcgagcgtggtgtgcttgaagtgatggtcttttggcaatatgacttttgcgcctgcccggcttgccgctttactgatgccgcttaatgtaaaacagcttgcggggtcgttaatcggattgtcggtaacgtacacccgctttgccccggctttgtaacacagccggactacctcagccaccagttcagggtgggccgtggctccaagcattggcggcgaggcgaatgcaacatttggttttattgcaaccgtttcgccgggcttgacaaatctttttatgccgccgagcaattctatcgccttgttgacagtcactctcctatcggcgcctttgacaatgctcattgtcttgccctcttcagacggcaccgaaaaaggcggtaatgttacgagcgattcgacatcaacgccgggttttgggccctggctatcataaagccgataagaaattataccggcggcggcgatcgagattcctgctttgcctgcccgcgccagaaatttccttcgcccgagttttttatcattttgctcggtcattgttagctgtcccgctgagcttattaacaagcattaccgctaaattttccgcggactgttggttttcagcttcgtgaatgccaacaacaaaaggccctgtcgaaagcacaatttcggtggtgtcatagaaatccaggactttgccttcgagggttttattggttgccttctttgctgtggcgccattttcaatcagaaagctgcgatagctttctgcgactgcctcggcatctttgggaccggagcgtttgctcagaaatgccgtgatggtttcaccgttaagctggtatccggcagcgaagatgtcagtcaatccttcaaagccaaatgcacttgccagataaagcttaatgcttcctgggaccaaattatcctttggcaggtgctcgatttcaggtatagcggtatcatcgtgaacggccaggttcgtgggaattttccttgcgacttccgccattgccgcaaacagctcatccgattcggcgaagccgaccagctcgatataatattggccgtgcgcaagataaaacgcattactggttttgtatgcaaattgcatatccggcaggttctcaacttcgggccttttttgcacgctgtaaaccgagaatgcgtttctggttctggccatatcaaagatatagagctccatcaccaggttttcatccgcctggcttacaaatctctgggtggacaattttataaaaccagcgtcgatataaaggggggccttgccgttaatcttttcgtaaagattttcggtggtgtagacttcaatttctgaaagcgttttgaatccgtaaggcagaagaaaagtcaggtctttcttttgttttggcatctgctttatgaataccccaacggcgataagtaagagaatcgctaataagcagatgcctataacagattcgagacgttttgcccggcttggtaccgaacccataaccaactccagtaatgacaaattacttgactttataaccgggctggattataatttttgccggtgttgctgtcaaccccaaatgctacaggtgaaaaaggcgaagatagatttctaacgaggttgacaaagcaggtcagggcgtgttataataggttgctaaagtaaaaaggagactgaaatgattgaatatgcacaatatttggggttttggacgccgggcccccttgaaattgctgttattgcgattgtcgctcttctgatattcggcagacggctgcctgaaatcgcccgcaacgtaggcaagagcctgactgaattcaagaaggggcttcacgaggccaaggagaccaaggacgaattggtggatgatgtccgggaagtcaaggatgatgtggtaagagaggcgaaggatgccgccgggctgaatgaagaggatacaatgggctctgattgattattgataaaggggaactaatcactgagaacaattgtcaatcattaatcaacaatcaatattgaagatccgcctgtggcggaatcaatttttaagatgggcgatacaaagaagaaagaggacctccttgattccactatgagtctgggcgaccaccttgaggaattgcggatgcggctgattcgcgcgctggtgggcctggcgttagctcttattatctgtctgatcttcggcaagctgctgatatcatttattcaaaaaccttacgttgctgtgatgggtgaagaggctactctgaagacgcttgccccggcccaagggattaacagctacgtaaaaatagccttggtctcaggcttgatattctcatcgccctgggtcttctaccagttatggatgttcgtggctgcaggactctatcctaatgaaaaaagatatgtgtatgtagcagtacctttttcggtggtattatttgttgccggagctttgtttttcatctttgtagtggcagaagtgtctcttgctttcttaataaaggtcgacaggtggctcggactggaacccgactggactttcccgaagtatgtgacctttgtaaccaccctgatgctggtatttggtgttgcgtttcagaccccgatagctattttctttttgaacaagacaggtctggtttcagtccaggcgttacggcggtcaagaaaatatgtactgctacttatcgttgtagtagcagctatggcgactccgcctgatgtggtttctcaagtaacactggcgataccgttgtatgtgctgtttgaattaggcatactgctgagttactttgcagaactaaaaaagagaaagtcgaaaaacaaccagtgataagccgacaatccccagctttcccagtaccgactacttgtttcttt

SEQ ID NO: 5251 - DNA, 5435 bp, Artificial
  Synthetic
agccgagtcgatggtagctaaggtgaacgacaagcgtggttatacggagataagttgatgcgactggttatccatgaggacgaagtagattcgatggattggttatatggaattagatcgaaacgtatacctatgaagctcacagtcaaataccaatcgggatagaaatgcggcgcgcgcaaccttaggcaaaggcttggctgtttcagcgtttccgctttacgtgcccgtttagccttcaccatagtccacctttccgcaagcctccctgcgatcccggacagtcggatttcccaaatcaccatagtccacctttccgcaagcctccctgcgatcccggacagtcggatttcccaaatccggttctggtctcggccctatttgtcattttctggataaaggccttcctgtacaatttgagacttaagtgctagctcacttgcaccccataattgtacagtttaccagtatcctcgttccgagagtccatggcattcgttccagttcggtgcctggatgcacatgccttactcagaaccaccgagtacccagagcccctttgtcaggcgtgggcgctacccactacctggatgactttgaaagtcacctcagaagacattactcttccttcatagctcatacggactcatgcgccagaccaaatccctcccaacgtcttggttttcccttgtacgttaggtctttgcaggttgtcgccagtccctgctgggaaacggcccttcccgacattatctctgcaatccttgtataggtgcaaggacccttaccccgcagcgtcccttcggtgcccttgcccgtttcttcccgaaggactgcggtctcacctcaggatttaaaggttcgacacgccaattatccgtcgcaatgcaacttcaacaacggggcaaatttcggggctgcagtcattccataacgttcaagctcctatacctgctatgccctgcggttgcacccaccactgagcatatatgagctcagggcagccgggccgtttacaccacgcatcgcccggatggttacccattccgagatgtggcatcgctacgtgcctgaatcgggcaactggcacgacgggactttcacccgctggattgcagccttgtcggctgctccaaatccctgttgccacaaaaattttctttgaggcatccacgttacgacgtgtcggccacgcttcgtagcttatctgaacagcctttcgacttcacgatgcattataatggacatcgtgaatctagctatgtcatggtcaatcgtagtgtggccaggggccggccaatcgagtatacttgataaagtgttcatgaagctgtattctttaatctcccaagagtatgcttcgaacgtttaagaaatgacagatagtggtgaagtggtctgaaaacgggcccgggaggcgaagacgtgagtacaggtacagtgaaatggtttaatgcaagaaggggatacggttttattgtccccgatgatggcggagatgatttatttgttcaccgttcggacattaacacagaggactatgcatcgcgagattattaaggtcggcaacgacatggttgccgaccatatcaatcataagggcttggataatcgcaaggccaatttgcgagcggcgacgattgcgcagaatgcgtggaaccgccagcgcaaaagaagcggatttatgggcgtagtgtggaataagcagatgaggaaatggcgtgttaatatcagtcacgagggcacgtgcaggcatatcggctacttcgatgatgaggttgaagcggcgaaggcgcacgaccgggcagcgaaaaaatatcacggagagttcgcgagtttgaatttcacgcgttaaagccacatcacagcgagtccgactatggcggacgcagcaatcttaagcatatttggctgcgcaatgtgttgcgcgggttcctgcttggggcgagctatcgaggtgtaatcaccccacaaatcgggggcttctccagcgccgtaaaagttgataagaattttagatgcgccgtaatcacccctcaaatcgggggcttctccagcgctgaccgaattgataaaaccaagagagcgctgtaatcaccccacaaatcgggggcttctccagctgtacgacaaatcataacagaatatttgaagctgcaatcaccccacaaatcgggggcttctccagcaaaatgagacaccacgcttgacgtcactgtgctgtaatcaccccacaaatcgggggcttctccagcttcgagctatatctggctcggtctgatttggctgtaatcaccccacaaatcgggggcttctccagcactggcttagcaagttcctttgggcgtttcgctgtaatcaccccacaaatcgggggcttctccagctaatcgaagatgagaccgaagactatcactgctgtaatcaccccacaaatcgggggcttctccagctgattgggaaagcactccttacgcacgagagctgtaatcaccccacaaatcgggggcttctccagcacatcctcgataatacgttatctcgattggatttacaacagaaaaatcactgaaaataccagggtttttggtgcaatgcgcacacattagaacctgttttcatactgctaaagaccagcgtttttcaatcccttcccttttcataattccacagaacctcttaaaatctgccctggcaaaattaaggttatgatgcaaaagcgcgtttcgcacacgtcggagagctttctggtcatcttcattgtaggcgcttttatccattatctcgctaaatgggatgtagttctttggaggtcttggctgctctggaccgatagtctttttctcaagctcgagtatggcttcaattccttccctttgcaggtttgtgtatctgttcatcccttgcgtataaagcctatggtagtcgatttgttcttcgtcttttggcaaaaaataatcgcaaagtcgggccaaaaactccgcgtcgtccatcacatagagtttcgtataatccctcagcgagaaccgtaccgaacaactctgctccggctgtgccggattcttcaaggtgaaaataattacttcttcgccatcctctttcttccactcgatttgctgtgccctcttggcaagctctttgttaagactaagatgatattgccttgcgatcatcagcaaaagcctgtccattgccagtgtttcatacagtctcttattgtctttatcaaacgtatcaagtgacacgatttcgtaatactccccccccagaggaacatcataaacctctcctttttccctcaccgcttcttcaacaagcctcgcaaaactctttctgctttctctgaagaattcattcctcaaaaatcctttataaataaccggctgtttcacaaccctgtccgtcttttcttcaaatgacacctctttttcttctttgggtatcagtccaacatattccttcagttcttctctgcctaggctttcaagttcttgcacgaccaaatcgcacaccttttcgtgcagcgcattgacgcttttatgcctggaaagattgcacacgatgttcttatctatccgtctggtcttcttcaattcttcaagctctcggtaaaacccgtcgaggtgcttagtgaccaaaagctccaaaatacggttatattcatcgatgttcagcggcctctcacaccgctcattgatatacctcagaatatcccgtccttttcgatggagctgaagctccctcgacttttcttttttctccaaccacttggccttaacataatcaactcgcgccttgatctttttttcatcatcaacccctaagagacccagatgggaacgcacaaacctcggaagaaatctcacgtatccttcaatctcttccgtgcttttcttctctatgtgaggcaactggttgcgcaagctatgaacatacctgtcgattcttttgactgcctctgctccttttcctaataagctcagtagaacaagatatttaagctcgtagacgcccatcctgaatatataggtttgggcgcctttcttctgagttcgcagaatgacgttattgtgtttgatataaaatgggtctccttcggctctctcaaaatgaatctcgactctcggcttcttcctgtgaggtttctgctccttgccatctgtattttcgtcctgctcccgcttaatcctcgttctggcaaaacatgctgtgtagtctgccaaatcctccagcccgtaatcctcaagatagttcagcgcaaacaatatgaacttgtccgtctttctttcgcttaactgggtttcgcttcgcatttgcgattctttgatacgctgatacgactcactgggaactcgtgacaaataccccagaatatcccggaacatgaccgcatcatgatccggcgtcttaaccgaataactgtccctaagacaatatgtcgaaaaaacgtcccgcgttattttatattccccctctgtacgcgtaaacccctgaacatatcccattaaccgatttaggaaccttctctcagcaaaaaatgacgcgaaaaataccacacctgctgatgttatcctgccgttctcttcgaacaactccccaaattcaatcgaaatatcttcctgttccttttttgcctgttcaaaacgcgccttttcgtacgctttttccataattatcctgaccgggtcattttgggtgaatatcaggcagtcaggcgtatgaaaatagtgcgagaaataattcctcaaatctctaagcttttcatcagccgctttttgaatttcctcctctacttcgttttgttcttgttttgcatagatcagttttttcgtttcctggtcaaaccaatcttcctttctgatcctttcgaatcgtgtcagcgtttcctcgaacaacttcggattcccctgcaaatttgtttgcgccctattaagcactatcgcaaaacaccacttcttggccccctcatattgctcgatagaatacattccttggctgcttcctttcttgatattttcaacctgcatatctcagactctcccaattgttgtttttcgccatttttgttgaagtccccgaatgtcagtctattgggccagctgagtcaacccacaaggcacaatgtacatacagtctcgagtcatttcgagaagactttccgctcgcccgataagataagctttgagtatctcacggggtggacccgagcagataattccacatctcgtatccggtgaagctatccggcataaattcgtgcttagtgaatcgtgtttcgtgttgatacggctcccggctgcattcacttttcacggcagagaatatcgcaaaataaggcaacagtcaaaggaaaaagggtaaaaatggtgaaatagatgagcgagcagtgaattgttgtggcaagcaagccgcaaatgaatccttcggccacgctc

SEQ ID NO: 5252 - DNA, 7608 bp, Artificial
  Synthetic
aggacaggtttgggggcaaatattagaaggcggttatgcagttttgtggtcgcggaggctatgggggagattgctggtttctgaggcaaatcggggcggttatgcgggtaagatattaaggaaggccggtctttggtcatatcagttacaaggggcttgaaagattgggcgaggttcgttagattagtgaacgtgataggctgccgaatatgataaggattcttgtaggatgaaaggacgcgaagaagatgaacgggacgagacagacaattaagctgtggacgtgggtattggtggggctgggctgtctggttggcggacggctgaacgccgagccgtgggtggtttttgagggtggcgaggggccgggcaagggaaggcatatcgttcttgtcaccggcgatgaggagtaccgatcggaagactcaatgccacaactggccaagatcttatcagtgcagcacggctttaagtgcacggtgctgtttgccatcaataaggaaacgggcgagatcgatcccgtgacggtggacaacattccgggtcttgaagctctggggcaggccgacctgatggtgcttttcacgcgtttccgcgagcttcccgacgagcagatgaaatacattatcgattacaccaattcgggcaggccgatcctcgggctgagaacggcgacgcacgcattcttctacagcaagcacaaggatagtccgtacgccaaatacagcttccgcgacaggcagttcgagggtgggtacggacgtcaggttttgggtgagacctggattaaccattacggacatcaccaaaaagagagtacgcgcggacttattgcgaaaggcatggaaaagcatccgattgtgaaaggcattaaggatgtctggggcccatctgatgtttacggcattacgacgctgagcggcgacagcaagccacttatcatgggacatgtgctaaagggtatggagccggatgatgagccaaacccggagaaggagccggtgccggtggcctggacaaaatcttacacaggggaaaagggcaaaacggcccgcgttttcgctacgaccatgggacacggtggcgaccttaagaacgaaggttttcgccgtcttctcgtaaatgcatgttactggtgcatgggaatggaggataagattccggccaaaagcaaggttgatattgtcggcaaatacgagcccaatccgatcgggttcggcgggcacaaaaagggcctaaagccctcggatcataaactctgatgagcgggcacagctcggcatactacgcaggacaacagcaaacatagcaggcgggacagaataatcctggccgcgtttgcatcatacggtgaagggttcccgctattcgcgctgaacgctacatcagccggcggcaacatcgagagcgatttgaatttctctctgaagatttgcacattttgtggatgtggggattattgtgtagaatatcgatgatggtgatgatagcggtgatggttagcagcggtgcacgaattcgcaggcttcctgctacgggccgataagaaatccggctgctccatcgagcaccgccgcgaacgttataaacgctgcctggggtcatcagattggattgaggaaacagctcttccgatataatcgtatggtgcttttcgtaattgtttagtcgtttgagaggccttagatgggtgaagaatcacgcaaggtggcgctgcccggcaggatttaccagaagaagaagcgctggtggtggaacgtgcggctgcccggcgagcagaaggcaaaagctcgcgcactgaagcctgctgggtcgcgtttggctacgacggagcgtgaggtagctgaagagattgcgctggagatgtggcagctcgccataaggggcgaaattgaggcaaaggtcaaggcggaagctgagcaaaagattagatcctgcacggaggagatagaaaaagtcaaaaccgaagcggctgaaacgatagccaggctaaaggcggaattcgaagaaaaggtaaggacttactccgaggcggtagccagagccgaggaaaaagcgaaggcagaggccgaagcaagagcacaagtggaagcaaagttgaacgaggtgcttgctgagccaacggcaactggtgcctgcgaatgttgtggcagagaagacgttccagagaatgacctggcgagaattgactcgggacaaatgctttgtccggactgcattaagcaactaagaggctgattctccttttatcggcagctacacttcgaggctcgactcactcagcgatacagctaacaccggcagaaagactttctcacgatgagccggaagagatcccaccggagacaacaaacgccattgcttgtgaactttcaacatccaacggcttaacggactctttcggcaagagcaaaacattgccggcgaagttgtaagattgaggcaggtagactgcaacatggtctgaaagtccaaggttttcaagactctctctggtaacaaaaccgaccacctttgcatcggctgcaggcacaatggtggcgagtacgggtttgtcaaaacttttcttctcaccagcgaaggcctcaatcacgtccttaagggctgagaaaagcagcttgaccaaagggagctttttgaagagcttttctatgagctcaaagaacttcctgcctaaaaagtttgatgtgagaaagccaataacaattatcaatacgaccgtcaccagaagtcccagccccgggatttctattcgaaagagagcccgaaggaaggcatctaaatttgtgaatgcccacacaagcagatagacggtgagggctatcggtacaaagaccagaagtccctggacgaaataatgaattagttttttcattttcttgctccaaaaacgggccactcaaccgataaggacgaagagtaaaggccaaaagtgttcttttcgcagtttcctcaaggaagacgcataacaccactacccatttgactctggctgggcacagcaccatgttctcattcagcgaaataccaaatttgcgtaaccggtgcaatggcttggccggtaaattgccacgaaatgctttgatccttgagtgtccggcggtacctctccgcccggcttaggttgggtgggctgtggacaagaagaaaagaaaaaagcccctgtgcgggcagcagcgaagacatccccgtatttccatttctgtaatgtttgagatactcgccttctgcttgacaggggcaacatcaagtcaatcttatcttcttgcttcttagctcccttcttactacgcccacatataaccgcggcttgttctcgatgccggaaagtagtcaagcaagtcaaaatcgctatggccggagatgtcaccttttagagtcacttactactatatccagcctaacattttgaatcggcagatttggtacttgagcttgagcttttctggatgtggccaatttcggcaatatggcggtgttttaacacaggcaaaaaggccaaaagtcaaagagcttcctatttcttttccgctcccccagacatccaacttgacgacatggagcctttctcccaagctcatcgacttctctgacttaaacccgataacgagaattattattgttcggaattttttcagaagactttaagaatacgcaaaaattttcttctttttgaccgagaagtcactgatgagccaactcgtcagaggccgtgaattggaaagacttttaccttaatcgtttctattgtggcttctattgcgggcatcaccgtatcccgctgctggttgtttacggcaagcgctttgtcccgcaacgggccgtgccattgagaagtgccgagcatgacgccgtcgataataggattcttgctccggtcactatcggcgccgcatagtatggtccaggcaagggcccaggcccttacggtgttgtcgatgtcatatccgccgcccccagttgcaaggatgggtctattaaaactcagcacggattcgataacgccgacataagcattattagttaagcacaggtgtgcaagcgggtcaccggcaagggcatcagcgcccaactgaagaacgattgcatcgggattgtaagcggcgatcagtggcggtgctatcgccttgaatgccttgatgtatgcttcgtcataagtacccaccggcagagggacgtttacacagtagcccctgccctggccggttccgatctcgtcggcgaatccggttccgggaaacagtgctctcgggtcttcgtgaaatgatatagtcataacatcggagcggtcgtaaaacgcgtacccaacgccgtctccgtgatgaacgtccacatcgaggtataagactcgctttccagcctcggcgagtatgatacaggcaagagcgacatcattgatgtagcaaaagccggacgcgcgttcggggcctgcgtgatgaaatccgcccgatggattgaaggcgacgtcagcagagcctgcgaggatgagctttgcaccggtgagtgtggcaccagaggccaggactgcatagtcatatagtcccttaaagacgggacaatcgctcgtccctaaccccatatcgagtgcctcggcatcccagcggccttttgaagcggtctgcaaggcgtgcaggtatcgggctgagtggaatttcttcaggactatcctatcagcgggcgccggcggcacttcggttcggccgccgcccgaaagcaggcccatggaattcacaatcttgcgaactcttttagctcggatcgtgttaaaaggatggtccggggggtaaggatgcttttctagctcccgcgaataaacaaagacagcttttctcattgccggcatcgatccactgacagacagttcttcttaaagcgtcgaccactccaaatgacagaatatagtactctatgtgccgcaaaaccgcaaagccttttgttgttcttcagcctgtacaaacaccattactattcttaaaatgctctcttgaatggcaagagagtcaaaggcgtatatcaacagacagctcaaagcaggaacgacttgagaggcaagcttatgaagcaggcagggaccaaagagttggagcaaattccaggcgtaggcgaaagaattgctcaggatatgcgaaatattggtattcactctgtcagccagctcaagggccgggaccctgagaagctttatcaaagactctgcgattttaaggcaagccccgttgacagatgtatgctctacgtgttgcgttgtgcggtatactacgcgtcaaacaccgagcatgagccaaatttgctgaaatggtggaattggaaggataaagactgacttcttctcgtgctctgacgccggcagcagttcgaatcagtttttatcgagcgggtcataccagcgcttaagcacgccttcccccgtggtttctttcatatcacttacatgggtgtccagccaaagaatattcaaggttccaccagttctgaactcgtcacccgactttatgttgtgccgaaagatcccgcggtaccaattcctacgactaccagtttctcgatagtgagtcaggtttatgccagttggactggggaagagcatgtcggagttcccggcgttcgctccattttcgattcttggctccatgtggtcatgggcaacaataacttcagtgtgttttggaatagcgtttgtgttctctttggtcagccagccattgacagcaaatgccgaagtgtagatgagtttataatcaccgccatagagtaaatcctttgctatcgtctcgcaaaagttgcggaaggctgcgcagccaaagagctttctttctttgacatagtctatataggcaatgccccaataagcgcgatcatccgtggccctgagcggattgccggaggaattccaccaaaggtggccgttacagttgttggtgtgcgtgcacatatcaggcatcgtgtattcgttgtcgtcaaggtacattctaatacccaggcctatacctttgaggtgtcccttgcaggcctggtctcgtgcctgatcctttgctgcctgcagtgcaggcatcagaattgccaataacagagctatgatggagataaccaccaacagctctattagtgtaaaccctcttgccatgtacttagcgagccttgcgttgtaattcatcattgcgttacctcttagagttgtatccatgtgttagcccaaagaatcattcttcgcaggatactcacatctcggcatgaaggcggcgccgccatgctgatatgcagctaacagcctacgtttggtaatttgtttcacaacctaccattaagcgtcaatatcgctatgtttgagcggtccttaccgctttagaataccaaatctacgtgaaaaaagcaagccattgtggatttcttcaataaatttcctcgcggaaggaccaagtttgctgaattcgcaccggctaacgtgctttcggcgcgattttcgtgcggtggtctaagcccgagccctccaggtcaatgctcactgacgggcctatcttcgcaaggccggtatatccggctcgatgtgaacggtgatattgaccgggcgggtcaactgctcgtcgagggcagtctccagactctcggatatttcatgggcggcggctatgtctaaattggggtcaacaagtatatgcagatcgagaaaaacctccctgccaaccgtacgcgtcctgagcctgtgccactggcggatttgcttatttgcattgattacacgctctatgtgctcaactgttccctggtcgacggcaccctctgtcagctcgcggagggaatcgccgattatcctaaagcccacccagataatcatgaggccaaccgcaacggcggctacctggtcgccgtgctcgaagccgagccttagcgatatgaaacctatcacaaccgccacggagctcaaagcatcactgcgatgatgccaggcattggcataaagtgcggcgctgtgggattggatggcagctttttgcgtgaccctgtagagccactctttagcagcgatcgagactaccgcgacgaccagaatggcgatgcgagggatagtaactcgattggcggctatggcagcggtggcatagtagaccattgctccaccgacaagaatcaagatgatagcaatcgagcctgccgagaaggtttcaagccggccgtggccatagggatgttcccggtcaggctctttggagccgagtcgtaagcctatgagcacaacgacgtccgtggccatgtctgaaagtgagtggaagccatcagctatcagtgctaaggaagctgtgaaaaagccaatgacaatcttgagtgctgaaagcgcaatatttatagcgatgccaagatatgtgatcgaccttatctgcttgccggcaattttttgtttgtcgttttgcatcaatctgttagcccaacacctggttgcgtattttcaaaacgtcgttgatatatcgcctaacggtggattggtcctttgcctccgctatgacccttactataggttcggtattgctggccctgagatgtagccaaccatcatcaaaatcgaatcggcagccgtcggtagtgtcaagctttgcatcggtgaatgtctctttt

SEQ ID NO: 5253 - DNA, 5615 bp, Artificial
  Synthetic
tatccaaaatgtggtttgaattcaagaatcaacgctttattccttaaaaaggggcggtgcgatggaaaaagaaccagaaacatccgtgcaatcggcgtcgggacacaatatggatatcccgattgactggtcggtaacctcacgctatttcgaagatgaagatacgctgatgcaggtggtggggatatttgctgaagactctccgcagaccgtccgggaccttgccaaggctatacagacgcaaatatcccaggatgttcaattgcacgctcacagcctgaagggagcctcggctcttatcggggccgaacatctgcggcaaagagcctggcggcttgaatacgccgcccaggagaaaaacacggcggcgtttgaggcgctgtttgacgagacaaaggccgagttcgacaagctgatgtcgttcctttaccgcgccgattggattgaagcagcaaaagaacgccactgcaacaggcaacaggccgagcaggtatgaaacatcttttggaaaagaaggcgatggaatgagtggatggttctccattttgatcattgatgatgacaggatggttacagacaagttggagaagatcagcggcgccaaggctgcaaagaaaaggttcagcctggcaggcgttttctcaaagggcgcctgaagccctttatttgcaggcgtgctaccgcttgtcaacgggcaggggacagaaccgcaatcaggattaccatcagtttcttcattccattaacctcgctttttcctctcgttctttttcttcttcctggttttcgcagcgttgggctgtctttttgccggttttgtatagttgtcgccgtaaatgtcaatgagtgcggcttttagtttttcgggccagttgcggttttcaaaagcgcacacgagcggatcgccgctttgtttcatccagttatgaagccggccctgcatcttcttgatttcgctcctttgctctgcggaatcgataaggttgttgaggcagtcggggtcatttctgagatcatagaactcctcggccgcgcgatatctgaacatcttgacgcgctgtgcggcgaacttattcgttggagcggcctcgaccatcgccttcatggtaaggccctcgttgttgtttcggtaccagaatctgccgtcggcccacggattgaagatatagccgaagcgcttatcctggacgcaccgcatcgggacagcgtctccgccggctttcatgtctatctgcgtaaagaccacgtcgcgtccggattgcttttcgcctttcaacagccccaggaaagaggaaccgtcaagccccctgggtatgcccagaccgaccgcttcgagcaccgtcgggaagaagtcgatccctgagataaagtgcgccttatcgacggcgcctgcttttaccatttgcggccaacgaacgatccacggcgtccgcgtgctggcaagataggcgttgcattttgcaaacggtatggcgatgccgttgtcggagaggaacatcacaagcgtattctcctcgaagcccgactccttcagggcctgcaacgtcttgccgaaggtatcgtcgagtcggcggacggagttgagatagcagctcagttcctgccgaacgcccggcaggtcgcagacaaaaccgggaaccgcaacctcatcgggcttatacgtctttgaaggttcctttgcccccttgattggcttgccgccgatatgatacgggcgatgcggatcgtgcgagttgaccataaagtagaagggcttattctcgcggcgacacctcgccagaaactccttgcagtaaactgtaatagagttccggatcgcggccggcgccgagttccttctggtcatgcacaaaatcccatttgtaatccgcatggggcgttgagtgccccaccttgccgagaataccggtaagatagccggcatccctcagcgtctgcatgacagtcatcaccaaggcggcgcccaatcctgcggcccttagaaaatcacgacgattcatcattgtccccactaatccttattgttcttctcaagataccccgacaatttctgcatttgccgatacaggccgccgggacatatcagtatagccgcaaaccttgaaaatatcaacctcccggaatataacgtcgacttccaacccagatcgccaatccagaataagaaaacaaagcaaaacgcttcaaattcgtttaaccccagggttcgcctgaggttcgtaaacaccatctcgatgtacatcgggattcaaattcgttgagccccagcccttcttgtggctcttgttcggcaagaaacgctgtaatcaccccacaaatcgggggctgctccagcatcgccaagacgggcaatgccgctttgaggctgtaatcaccccacaaatcgggggctgctccagctgatttcgagtttcgatgctttcggacagggctgtaatcaccccacaaatcgggggctgctccagcactccttatggagaaggagcttatcgtgtcgctgtaatcaccccacaaatcgggggctgctccagcttattccttccatcatcccgacagcagtgggctgtaatcaccccacaaatcgggggctgctccagcccactttcgtaaccattttactcgcaaacgcttataacgaaaacactttccaaaaaccataccaacgtcctcatttaacaggaaacttccactccttttcaattccatatttcttcataacatcactaaacaacccaaattcatctatcacaaactttaaatgatgatggaaaaacgctctacgcaccttattcacggcggtcttctccgcctctttacacattgtttgtgccagtatctcacgaaaatcaatataatgcgccccttccttctcgctcatctttttggctttgacaaccttctcttcaaacgccagcaccgcctcgacacatttcttctgcagatcattatatgccctaaaccctttttcgtaaactgtatgataccgtatcttccctttttcgtgcggcataaagtactcacatatccgcccaagaaactcagcgtcatccaacacatataacttgccgtaatcactcactgagaagacgatgcttttttcgttacccactgagccctccacgggcaactcgatgctatcattcgaccacacaattttattacccaattccttgcgtacactccccaggaagtattgcgccatcatcagacacaaacggtctcgcgccagcgtttcatacaaggctggattagcaccctcgaatcgcccaatcgcatcaatatgataatactttttatccagcccaacgtccctctgtccgccgccgctttccaaatgctcttccacaagcttcgcgaatcccttcttgctgtcataccagaacttcttgcgcaagaaacccctgcggatagaaatatgctccttgaaccatgcaaccttctgcttgtaatctatttcatccttcttcccaagccccacataatcgtagagcttctgatcgccgattcggcaaagtctgttgagaatctgatcacacaccacctgatgcatctcgtttattgtggaggtctgcgcaaaaattgaatatacccgcccgtcgattcgctcggccagttgcaggcgtttcagtcccgcctgaaaattctcaacatccttgccaaccagacacaccagcagccggttgtactcgccgggattgaaagacctcgtgcaattttcatttacgtattgaagaatgtcccgcgccttctcgtgaagtgtcatctcgttggtcgccgccttcttcttttcccacacccctcgaacatgctttactctgccgtctattctttgcttaaaagctttcctgccaatcccatgttgctccagcacaaatcgcggcaggaagacgtgattatccttatctgtgaccttcactacatccagaatgttctccacatgctgccgatacctgtacagttttgcaatcgcatcgtcgccctttccctgaaggctaagcaatacaaggtatttcaattcgttaagccccatgcgataactccgaggcccggcattcttatcaatcctgacgataacattgttcttactgatatagtatgactgatcttcgtctttttttgaaaagtcgacaactaccttgcctttggtcctgtgctttttgtgttcgtcgcctgccccggcctcctccctgacaatgtgtcgccgcccgaagcatatctcactgtgttgcgcctccagataatgcagtgcaaactcgatgaacttgtctttatggcgtttcggattcgtcccctcattgtcgtttgctcttttcttgtcgccctgctctccgtggtagtattcatacgcctccgcagggatgcgtccaagctgcgcgagtatatccctgaaaagcagcacgcgtttgtcccacgccttcgtgaaacgactgtctttcaggcaatacatcgaaagcgccttccgagtcagcttgtactgtccttcgtttttcttaagcccacttaccgcaccgtacaaacgatccagcacccgccgttcaacaaagaacgaaacgaaaaacacaacccccgccgtagtgatccggtcgccttcgaacaggctgggaaactcgatgatcacttcagtttcgcgtctcctgcattcaaagatcgcccgctcatacgccctttccatgattgtccgcaactcatcttctgctgtaaatgtcagacacccgggcgaatgtcgatagtgggagaaatagtttcttaacgcctcggccttcgcattggccgcttgtgtgctacacttgatcaaagcgcgtgtatcctcatcgtaccagtcgtgctttgaatacttttcatggcgtaacagcgactcgacaaaaagcccgtcgttcttatctcgattcacaagagccttgttgaaggcaatcgtaaaacaccatttccgagcaccttgatattcatcgatagacaactctctctttttcgaagtctgctttgacacttgcgccattgagcacctcccattccagattttagtgcgatctttacctcatgcctccacaacactcccagcgccaaacgttgagcaaagcaaaatacgccgcaggcgggctccgtcgaatccgtaatcctaatttctaacttcccaatcatctaaaccgcccgcaaccgatttgtcaaccaaaaaccacatcaatccgcagatggccgcagataaccgcagatattgcaactaatccacccaacccaaaacctctgttccatctgcgccctctgcgaaatctgcggacagctttttttttcgtgcccttcatgtcttcgtggtgaatttcatttaacatttgacaaatatcaaacggcatggtataatgcgttgcgtatttaaggacaaagcaacaccaaaaacagggggagtaaaaaaccgtgtccatccaaaaagaatcgcaggccgcaggcctgccacctatgattaacctcggtctttcagccaaggatgctccccacacccaaacaagcgaaacgaaccgtgcgccaagctaagctggtgcaattcagcaggtgtaatcctgcccggtcaaaggttagccgcccggccggaatgaacatgtacgtataaggaggcaacaaat

SEQ ID NO: 5254 - protein, 2123 aa, Artificial
  Synthetic
ATCACCTTTGTCTCCTGGCCCTTGTTTGGGCCATTGCCCGTTTTATCGTCCGGTGCGGATTTCCTGCACCCGCCCAGGCAAAGACAAACAGCCAACATCAAGACCCATACTCTCATGCCAAATCGTCCAGTCATTTGAATCCCTCTCAAAATAACTTTGCCCCTGATAATCGTTTCGTCCTGCTTATATGCCAAAGAAGGCCAAAAAGCAAGTATCATAAAACCCGGAATAAGAAAATTTTTCGGCGGCTTCCCGCGGCCATGCCCCTAAAAGGACTTTCTACGTAAAGTGTATACTTACTGCGCAAAGAAAACCAGGCTCAGAGCCATCACGATCATGCCTATTATCAGACCATAAAGCGACGGGGGCGCTCACCCTGCGTTTCGGTACGCCTCAGGGGACGCTTGTCAGCTTGTAGAGTCGCAGCATACTCGGTGCGGGCAGCGGGCCTTTGACCGGACCGCGCGGATAGGCGTTCATCCTGCCCCGGCCGTCGGTCAGAGGCTTGTCCAGCAGCCGCCTCCAAGTCTGCGTCTCTGAATCGTAAACATTGTATATTTCAATACCGTTGCCGCTGCCGCCGTCGCGATAGCGGAATATGAACTCGTCGTCGGCCCCGCGAATAAACACCGGGTACGTACAGCGGTTCTCCTTTTCACCGGTCATGGCGTCTATTCGCTTGAAACTGGTCCCGTCATAAGGCCGCCCCGTCCTGAAATAGATCAACGGCGCACAATGCATATTCCCGGCAAGATGAACGTACCCCTTACTGTCGACCGCCATCTTGATGGAATTATGACTGTCCCAGCCGACCCTGGAATCCAGCTTTTGATATTGCCATTTATCCGAATCCAGCCGCCGATAACAGCAGACAACATAACGTCGGTAAAACTCGTGAAATCTTCACCTCTTCGGTCTCCTTGAACCGGTCCGCACCCATTCTACAGGATCGACCTTGTAATAACCCTTCAACTCATCATAAAGCTCAGGGTGCTTGCGTTGCATCCGCCTGGGCTTTTCAAAAAATGCTTCCGTTATGACGGCAAAGAACTCCGCCGGATTCGTCGCGCCGTACTTGTTCATGGCCGAGCGCCTGTGTTTTCGCGTTTTCGTGCAAAGCGCCTCGTATTCGGCACTCAAGACGCTCGCCCACGTGATATAGCTTGACCGGCTCTCGAGGATAGGAGCGCCGTCGGCGGCGCCGTCTTCCTGGTCGAGCTGGTGAGAAAACTCGTGCATGACCACGTTCCTGCCGTCATGGATATTCCTCGCCCCGCCCATGACGCTGTCCCAGGCTAAAACAACAGGCCCGTTCCGCCACGACTCGCCGAGCCGGACGCTCCGGCCCTCGATCACCATCACGCCGTCCCAGGATGTCTGCTTTGCAACGTAGGTGTGAGGATAGACGTAGATGGTCTTGAGCTTCTTAAAAAACTTTGTCTTTCGATTCAGCAGCAGCATGCACGCCTGCGCCGCGATTGTTACCCTGATTTCGTCGGTCATCTCCAGGCCCTGGCAGCCCTTGAAAGTCTTTTCCGCAACAAACACATTCACAAGCCCGCAAAGCTGCTCTTGCAAGTCGTCCGGCAGACGATTATAAAGAGGGATGTTCTTTTCTATGTGCCCCTTCCAGTCATCGGGGAAAGGCGCACGCATCAACTTGCCTCGTCGCGCATCTCGAGCCCTGCGCCTTGCAGCCACAATCGCCACAAGCACAACAACTACCGCCGCCGATATTATAATTGTCGGAAACATTCCAACTCCTTTGCCGAAATGGTGTACATTGCAATACCCTTTCACAAATGATGCGAGGGATTCTGTCCGGTTCAGGCCCGCCGGTCAATGCACAATATACACTAATCGCCGCCCGGCGTCCACCACCGAAGAGCCGCCGCCCCCTGTCGACTGGGCCGCTGCCACTAAGCCCGGTCAGGAGAAACTCCTGAGATTCTGAGAATTTCCCGGAGCAGGGCGGGACCGTGCAACTGTCTTTGGATCCTGAGCCGGTTATGATAAAGGCGAAACAGCCCCATTATGGGACGCCACCGGCATGTCGGCCTGTGTGAGGGCGTATATACAAACAACCGCCCTAAACAGCCCAAGTCGCAAGGTTATTGTTCCGA

SEQ ID NO: 5255 - protein, 7683 aa, Artificial
  Synthetic
ACCGGCGGTTTTTCATCGGAGGTTTGGTTTGCTCAAGCGGCTGCAGATTCAAATTGAAGGCACGGTGCAAGGGGTTGGGGCCCGTCCTTTTTTTTATCGCAAAGCCAGGGACTTGAACCTGAGCGGCTTTGTTCTCAATGACCGCAGGGGTCTGGTGCTCGAAGTGCAGGGCCGGCCGGATAACCTGCAAGCCCTGCTGAACCTGCTCGAACATCCGGGCGGGTGTGCCGACCGGCCGCCTCTGATGCAGATTGAAAGCTGGCGCGCGACACCCTGTCCGCCGCTGGAAAACGAAACGGCCTTTCAGATTCTTCCCAGCCGAACGGAAGGGGCGCCGGTGTGTCAAATCACCCCTGATACGGCCGTTTGTCCGCAGTGCCTGCGCGAACTGTTCGAGCCGTCCGATTTTCGCTATCGCTACCCCTTTATCACCTGTACGCAGTGCGGCCCCCGCTATACCCTTATTAAAAGCATCCCGTACGACCGTTCCAATACGACGATGGACTGCTTTCCGATGTGTCCGCGCTGCCAAAGCCAGTACAACGATAAGGCCGATCGGCGTTTTCATGCTCAGCCGCTTGCCTGTCCGCAGTGCGGGCCGTCTCTTTCGCTGACGGACAGTCAGGGCCGGCTCCTTGCCGATGAATCCGACGCCGCCATCGCCCAGGCCGCCCGCATTCTCCGCTCCGGCGGCATCGTCGCTATCAAGGGCATCGGCGGATTTCATCTGGCGGCAGATGCCTCCAGCGAAGAGGCCGTTCAGCGGCTTCGGCAGCGCAAGCATCGTCAGGCCAAACCCTTTGCCGTGATGGTTCGCTCGCTGAAGCAGGCCCGTTTGTGTGCCGAGATTGACCCGCAGGCCGCCGCCGTGCTGGCCGGCCCGCAGGCCCCTATTGTGCTGCTGCCCAAAAAAGAACCCAACCCGCTGGCGCCTTCCATCGCCGAAGGCACCAACACTTTCGGGCTGATGCTTCCTTATACTCCCCTTCATCATCTGCTGTTTGCCGAGGAGGGCATCTTATGGCTGGTGATGACCAGTGCCAACTTCAGCGAAGAGCCCCTGCTGTATGACAATGAGCAGGCCCTGGCCGAACTGTCCGGCGTTGCCGATGCCTTTCTGCTTCACAATCGGGATATCTATCGGCCCATCGACGATTCCGTCCTTCACTGGGTTGACGGCGGGCCGGCCTTTCTCCGGCGGGCACGCGGATATGTGCCGGCGCCCATCCGAAGAAGCCGCCCCGTCCTCAAAGAAATCTTCGCCGCCGGTGCCGACTTAAAAAACACCTTCTGCTTTGCCAAGCGTGATCAATATGTGCTCAGCGAACATATCGGCGACCTGGCCGAAGGCAAATCGTTCCGCCATTACCTTTGGGCCGTCGGCCATCTCCGCTCTCTTCTGGAGGCGGAACCAAAGGCGGTCGTCTGCGACCTTCATCCGGATTATCTGTCTGTGCGGTTTGCCCGCTCGCTGCCGGCTGAACATTTCTTTCAGGTTCAGCATCACTGGGCCCATATCGCCTCAGTGCTGGCTGAATACCAACTCGAAATTGAGGAATCCGTCATCGGGCTGGCCGCCGACGGGACCGGCTTCGGCACGGATGGAGCCATCTGGGGCTGTGAGTGTCTGATTGCCTCGCAGGTTCAATTCGAGCGGTTCGCTCATCTGTCGTATTATCCTTTGGCCGGCGGCGATGCGGCCGCCCGAGAAGCCGTCCGTCCGCTGCTGGGGCTGCTGGGTTCGCAGATTCCTGCCTCGCTTGAAGCGGTTCTTGAACGGCTGGAGCCGGACCGGAAGAAACTCGAAATCCTCCGCCTCCAGGTTCAAAAAGGCATTTCCGCTGTGCCGACGTCGAGTTTGGGCCGTTTGTTCGATGCCGCCGCGGCCCTCGCCGGCCTGGGGACGGTCAACACGTTTGAAGCTCAGCTGCCGATGGCGCTTGAGGCGGCCGCCGACCCTGCAGAAAAGGGACTTTACACCATTCAGATAGACAGCCGGCCGCCGCAGCCGCTGCGGTGGGAGCCGCGTCCGCTCCTGCTGGAGATGGCTGAGGAGTTGGGCCGACATGTTCCTGCTGCCGTTGTGTGCGCCCGCTTTCACAATACCGTCGCCGGCGCTTTGCTGCAGATGGCCGAGCACGCCCGCCGTCAAACGGGCATCCGCAAAGTCGCCCTCGCCGGCGGGGTCTTCTGCAACCGCTTTTTAACCAACCGGCTGATTGAGGCCTTGAAACAAAATGATTTTGCTGTACTCTGGATGCGCAAGGTGCCGGCCAATGACGGCGGTCTGGCTCTGGGACAGGCCGCCATTGCCGCCGCCCGGATGGAAATGGAACAGAAAGGTTCACGATAAGAAAAACGATGTGTTTAGCCGTACCAGCCAGAATCGTTGAACTCGAAGGCGACCAGGCCGTCGCCGATGCCATGGGCACTCGATGGACTATCCGAACCACCCTCACGCCGGAGATTCAGTTGGGCGATATCGTCCTTGTCCACGCCGGCTATGCCATCACCAAAATTGACGAACAGGAAGCCCGGCAGACCTGGCAGCTCTTTGAAGAAATCGCCCGTCTGGACGAGCCGCCGCAGAATCCTCCTTCGTCGAGGCCGCAATGAAGCCCGCCTGCATCGAACTTCTTCAAGACCGGATGTCGCAGGCCGTTCGCCAAATCGGCAGGCCCATTCAAATCATGGAAGTCTGCGGCACCCATACGGTGGCGCTCTTTCGGCACGGCATCCGCTCGCTGCTGCCGGAAGGCATTCGTCTTCTTTCCGGGCCGGGCTGTCCGGTCTGCGTAACCGACCAGGGCACTATCGATGCCCTCATCGAACTGGCCTGCCGAGACGATACGCTGATTGCCACCTACGGCGATATGATTCGCGTGCCGGGCTCAAAGACTTCTCTTGAAAAACTCCACCGCTCCAACATCCGGCTGGTCCTGAGTACCGACGATGCCCTTCAGGCCGCCCGCCGGCATCCTGACAAAATCGTCGTCTTTGCGGCGGTAGGTTTTGAGACGACCGCACCGGCCACCGCCGTCGCTCTCCGCCAGGCCCTGCAGGAAGGGCTGGACAACTTCACCATCCTCTGCGCCCACAAACTCGTCATTCCGGCGATGCGGGCACTTCTGGAAGGACGCAACGACAAAATTGATGCCTTTCTCTGTCCGGGCCATGTGAGCGTCATCATCGGCTCCGATGCATATCGGCCCATCGCGGAAGAGTTTCACCGTCCCTGCGTTGCCGCCGGTTTTGAACCGCTCCAGATTCTTGAAGGCATCTGCCGCATCTGCGAGCAAATCCAGTCAGGCCAGGCCAAGGCAGAGTCGGTGTATCCTGCCGTCCGGCCGGCCGGCAATCCGGTTGCCCTGGCGATGCTGGAGCGTTTCTTTGAACCGTGGGACGGGCCGTGGCGCGGGCTGGGCTGCATCCCCGGCGGTACGCTCCGGCTGAAGAAAGAATATGAATCGTTCGATGTCCTCCAACGGCTGAACCGAACAATCCCGCCATCGCCTGAGCCGGCCGGCTGCCTTTGCGGCCAAATCCTCTGCGGGCTGGCGGAACCGGATGCCTGTCCTTTCTTCGCCGGACAATGCACCCCCGACAATCCCATCGGCCCCTGCATGGTCTCCAGCGAAGGAACCTGCTCCGCCTGGTACAAATACAAGGGCCGGTAATTCCATTGCCTGGGCCCGGGGCCTTCTTTTCCCTTCCAAGCCGCTTAACGTTTTCAATTCTTAAAGTTTCCAGCGTCCCCTGCCCTCATCGCCGCGCAGGCGCGATGCGGAAAATCCCCTGCCCATTCCACGGCAGTATCCAGAACCCCCCACTCAAAAACCGCACCTAAAAATCCGACTCTGCCCTTCAACCCTCCCAAAATCTGACCTTACCCAAAAATGGTTGTGATTACCCCACAAAACGGGGGCTGCTCCAACTGTTATCGACGTGTACGGAGCGGTCAATGTGTTGTGATTACCCCACAAAACGGGGGCTACTCCAACCAGGATTTGTTCGTCACGTATTTTGCACCGGTTGTGATTACCCCACAAAACGGGGGCTGCTCCAACGAGGCAAGTGTTGCAGTCTGGGCACTCTATGTTGTGATTACCCCACAAAACGGGGGCTGCTCCAACCTTCGAGAAGGCAGACACACGTCGGTGCAAGTTGTGATTACCCCACAAAACGGGGGCTGCTCCAACATCGGTGAGCATTGATGTCATAGGTATGATGTTGTGATTACCCCACAAAACGGGGGCTGCTCCAACCCCCGTTCTGCAAGGTACGAGTTCTAAACAAGTTATACCCATTTCTTTCGGCAAAAACAAGGGGGAAACCACGTTTTATCTCTTCTTTTTCTTCGGTTTTTCTCTTTTTTCCTTATTCAGATATTCCGACATTCGTCTTTCAAAATCCCGCCATTGAGAAGGTGTCGCCTCAAACTCTTCATGGAAAAAATCATTCCTTACTCGTCTTATACTCTCTTTCTCCTCTTCGCTCAGGCGGTTTTTTCCGGAAAATCGCTCAAGAACCTCATCAAAAGAAAGATGGCTTTTTCCCTTCCATTCCTCTTCAGGGATCTTCAGGTTTTCTTCAAAGCGGAACAGGGCCCTGACCACCAATATCTGACGCTGCCTGTACCGCTGGAGGCCGTCCCGAAGAAACTCCGGCCAGGTTATCTCTTTTCTTCCGCTGAGAAACCATTGACAGATATTGTCAAGCATCGGCGCCTTGTTCAGAAAGTCCAGTCTCCCAAAATCCTGCACCCGGAAGATAATCCTGCAGCCCTGAGGCCCCTTGTACTCCACTTTGAAGCGATTGTATCCGTCGGATTCTTTGCTTTCGCTGTTGATTTCCCAGTCAATTTTCCCTTTTACCTGAGGGGTCAGATGTTCATAGTGCCATTGAGCCATTTGCATGCACAGCAAGTCCTGCACATAAAGATAATACATCTTTTGGATGATTTTCCGGTCGGACCATGGATAATCGCCGGGCTGCTCTTCCCTCAGATACAAACGCTCCTCATGGAAAACAGAAGTTTTCGGTTTCAGGTGTTCCTGAACCAACTTCAAGAGATTCGTCCGACGGCTGCCGCCGGTTACAAAAAGTTTGCAGCGAAGGAAGTATTTGGGGACAGAGAGCTGGTTTTCGATAAACCGTTCAAACTTCCTGGCGGGAGTGTTCTGTTCTTCGTAGTGTTTCCCTTTTTCCTTCGGCAGCAGCCCGATATAACGTTTGAGTTCGTCGCCGCCCTGCTTTTCAAGTTCGTCCAGACGCTGCTGCTGAAGCTGACAGCATCGTTCGCACAGTTCGTTGATGCTTTTGCATTGGGCCAGATTATTCCAGACTGCCGCGTCCAGTTTTCTTTCGGTTTGGAAACTTGCCAGTTTGCGATAGAAATCATCAAAAGCCAGCGTCTGGAGCAATTCCCGCAGTTCATTATACTCCTTCACAGAGGGACGTCTCCTGAAGTCCGGCATGCTGTCGGAAATAAATCTCAGGATATGACGAATCTTTTGTCCTTTGTCCAGAATCCATTGTCCCGTTTGCGCTTCCTTCTGAAGGTTCGCCTGTATCTCCTTCAGCGTCTTTCGGATATAGTTGAGCCGATTCTGCACCGCCTGCTCAGAAACCTCCGAAGCCGGCGACCTCAAAAAGGCAGGAAAGTTTCGGGGCATGTTCGTTAACGGCCCGCGGCTTCGCATTCTGACATCCCAAACATACTTGCTCAGTTTCTGGACGGCATTCCCTCCTTTCCCGCTCAGGATTGCAAGAACAAGGTACATCAATTCATGCTCGGAGATACGAACCGTAACGGGGGTTTTGGCTTTAAGATGAATGCGGATGAGGGCATGGTTATTCCGAATATAAAGAAGCCCTTCCAAATCCTGTTCTTCCGCTGAAAGGTTGTTTAAAGCAGAAGGGAAAAAAACTTCTCTGACCTTTTTGCCGCTCTGCTTTCTGCGGTCTTCCTCGTTTTGAATGTTTCTGTACCGTCCAAACTCGACGCTGAGTTTTTCATTCCTGGCCCATGCTTCGATAAACCGTACAGCGAAAAGAATAAACTTGTTTTTTTTGCGCATTCTCCGGCCGGCTGGAGCGGTCTGCTTCTCCGTCTGGGCAGGGTTTTCTTCGTCCTGCTCTTCCACAGGCCGGCCGAAAAATTCTTTCTCTTCTGACTTGCTCAGTTTTCCATGGGCTTGAAGCCACTGGACAGAATCGAAAGGAACACACGACAAATAGGAGAGGATTTCCCGAAAGGGCCGTGTCTCATCGGCTTGCAGATAATAACTGTCTCTGAGGGTATAGAAACTTAGAAGAGAACGGGTAAAATAATAATCCCGCTTTTGCCCGGTATCCAAATCGCCGCGATCGCTCCGCTTGAAGCCCTGGACCGCTCCGAACATTCGTTCCAGCGTGCTTCGGGGCACAAAAAAGGACGCCAGAAAAATAACCCCTGCCGCCGTAATCCGGACCTGATCGCCGCAGAGTTCAAAAATGGGAGGGATAATCCCCTGATATCCGCTTTCCTTAACTCTTTTCTGAGTTTCTCCTGCGGCATACGAAAACGTTTTTTCCAGAAAGTCCTTTACTGCGTCATCGTCTCCTTTCTTGAACTCCAGTGGTTTATCTTCGTGATAATAGTGAGAAAAATAATCACGAATGCCGTTCAGTTTTTCCGCCAGAGACCGATGAACTTTCTCGATATCCTCCTGGGTAAAGCCGCCCCTGGTTCGCATGGCCTCCTTAAGAAGATTCTCACACCCTTTTTTCGAACCATTGTCCCAGGCAATATTCAGGGGAACAGTGAAACAGCTTTTGTGAGTCCCTTTGTAATAATCCTGGTCTAAAGAGTAGTTAACAGGCATGGTATCCCTCCTTCTTTGCCGGCTGGTTTTGGGCTGTTTTCTGCATACTCGACACGGATTCTTTTACATCTTTCTTGATTCCCTCGCAAGCGGATTTTATGCCGCCGATTTTCGGCCTTCCGATTTTTTTTGAAATCGGGAGGGGGTGGGCGGCGTCTTACTGTTTGTTCAAACGTATAGAAGCAGAGAAAGGGACTATATTCATATTATAGAAGAGGGGATATATTATGAATATTTCACTGGAAACCGATTCCGACTCGTCGCCGCTGGGGTTGCTTGTCCGTTATCGGCAGCTTTTGCTTTTTTATGCCCTGGCCCTGTTTTTTGACACGGTCAGCACCATCCACTTTATGAATCGGGGCGGCATCCACCTCGAAATTCACCCGCTGGTTCGCTGGGGCGCCCTTATCTACGGGCCTATCGCGGGGCCGTTTCTGTTTGCCTTTCTTTTCAAGTTTTTGTCGGGGCTGCTGGTGCTGTTTTACGTCCGCCGGCTTGCTCCTTGCATTTTGCGGCTTGCGGCGGCGGTTTCAACGATAGCCGGCATCCTGAACTTCTGGGGCGAGTCGCTTCTGATGCACTAAAAAATCGCCCGCCGCTCCTGTTTTTCAGCCGCACAAGACCGATAATATCGCCTTTCCCCCGATTAAGCCCGAGCCGGCGGCCAAATCCAGCCGGTTTTTGCCGCGGCCGGCCGACGGCGGGCTTCTCCTGCGGCCGGCAAAGGGGTATAATAGCTCATAGGGAAAAACTCTTGAAAGGTCCCGTCCAAATGAACCCATGGATGCAAGCCGTTCTTGTCTTATCGGCGGCGTCG

SEQ ID NO: 5256 - protein, 2802 aa, Artificial
  Synthetic
AGACAAAAAGGGCTGGGGAGGGGGTTTGGGGGAAATTGCTGAGAATCTAATTGGGGCACAGATTCTTGAACCAGAGGGGAAGGGGTGAGGGGTTGCGGGGGCAATTGGTAAGAATCCAATGGAGAGGCGAGGTTTTGAGCTGGTTGGGAATGACTGCGGAAAGGGGTTGGGGGAGACGGCTGATAATTCAATGGAGAGGCGGATTGGGGGGCCAGGTGGAAATGGCTGAGAGGGGGCAATGGAGAGGAAGTGGAGGGGGAAGATCTGAAATAATGGGGCAAATAGAGGGGGATTGGGGCGGATGAGGGGTGTCGGGTTGTGCTCCTTCTGCTGCCCATTTTGATTTCTTTAACTCCTTGCGGCTCCTTGGGGCCGAATGTCTGCTCCTTCGTCAGTACAGGGGGTATTATACCATATATGATTTTGAAATCAAGGAAATGTTTGGTAATTATCAAACTTTTTTTGCGTGCAGGCGGAGCCGCATTTTAAGAGTGAAAAGTGAAGAGGGAAAAGGGGAATAGTCGAGGAAGCGGGGCTGGTTTGGGGTTTTGGCAAAAAATAAGCAGAAAATGGGAGAATGGCTTGCCGGAGGGGGTTGGCGCGGGGTATAATGAGGGGCGGTATGGCTGCTTTGAAAAATATTGAAAAATCGGAAGGAAATAAAAATAAGGAGTTTGCTAAGGAGTCTGCCAACCTTTGGACGTGCACCGAGTTTCTGGGGCTGAGGAGGGAATGGCTCTCGAAACTGAAATTTTTAGAGGTGCCCTTAAGGGATTTTTGCTAATTCCTTATAAAAAGTGGAGAACAACTCAGATATTGTCGATAGAAAAACAAGGGAATCCCCAAAAATTCTAAGGAAAATCTGTCAAGCTGTAGAAAAATAAGGTTACTTTGGATATATTCAGCCCTAACCTTTGGGCTTGCTTTTTATAGAAAAACATACTAAAATAAAACAAAAATAAAGGATTACCTGTTTTGGCAAAACAAAAAAACCCCAAAAAAGCAGGAGTACAGAAGGCTGAACCAATAGTCTTATCTATTAATATATGTGATATAATCATTAGGGATGAAAAAACCAAGAAGGTCTCCCTCATAGGTTTGTTTAGTAACATAAATGCATATGCTTTTCCTGTTCAGCATCCTTTGATGCATGTATATATCGCATTAACAAATGGCCATGGAAAATATAAAATAAATATCCAATTTGTTAGAGTTGCGGACAACAATATCATTGTTGAAATGGAAGGCGAAATAGACTTTCCTGATCCGTTAGGTGTTGTAGAAATGAATCTTGAGTGGCGAGGAATACAATTCGAGAAACCAGGAACATACTCAGTTGAAGTTCTATGTGAAGGTTCACCAATTGGTTCTCGCAAATTTAATGTAAGGCAATTACAGAAACAAATACCGCCTACCAAAGGAACTGAAGGAACATAATATGTTAAATGACTCTAACAACTTTGTTTGTTTTCCCTCGCAGGAACGATATTATGATTTCTCTGCCTGTCAATTCGTACCGTCTCACTATATATGCTTGCGCTGGGATAGGGCCGAAGCAGAGGCCACAGAGGAGGAAATTGCAGATTATGCAGCTAAGAGTCCGGCTTTCGCTTTTCTTTCTGATCCCGAAGAGGATATCTATAATTGTAATGACGGCAAGCCGTTATGAGTTTAAAAAGAGGGGATATAGTACTGCTTTCTTTCCCATGGACGGATTTTACAAGTTATAAATTTCGTCCGGCACTTGTCATTTCGGAAGACGATTTTAACAAGAAAAACAATGATGCAGTCTTTATGTTCATAACTTCGAAAAGATACTCTTCTGATTACGATTTTTACCTTGATTCAGAAGATCCCAGTTTTAACAAGACCGGCCTGAAGAAATCCTCTACTTTCAGAATCTCTAAAATTATTACATTAGAACAGAAGTTGGCGAAAAGACACCTGGGCAATCTCGATAAAAAAGTTTTGAAAAAACTGGAAGCAGGTTTGAAGTTACTTCTAAATATATAAACTTTCGTATTTTTATTAACTGTATAACTAAGCTTCTTTCGCAAACATTTTTACAGAACTTGCTGAAAGTGTCAAGGGGGCGTTTTTCACGGTTTGGCAGATGGGGGTGGGGCTGCCGTCGTTTTTGATTTTCCGCTAACTCCAAACATTTCCAACAAGGCACACTGTTATTGCGGCGGCCGGGGCGGGGGCTGTTTTGATGCGGTTTTGCCGGACGTGCTAAGGACGGTGTTAGGACGGTGCTAAGAAGGAAAAAAGAAGGAAAAGAGAGAGCGGGAATAAAAAAGCGGGGGCCAATAAGAACAGAAACAAAAAGGTCCTGTTCCGGGGTCGGTGGCCCCCGCATAGTATGCCTGCGGCTTTTCGTGTTCAGCGATTTTACCATTTCGAATATCCCCCATTCAAATGATTCTTTTTATTTTTGAGTTGAGCCGAATTGATATTGATAGAGCATCCGTCTGGGAAAAACGTTCCTTTTTTTCAACCGGCGGGGGCCGCTGCCTTTCAGCGGCTGTCTTCACTTGAAATATTCGAAAAATCTTCATTGTTCTTACCCCCCATAGCAGGTTTCATCGTTAACTATGATAACGGGATTATACAAAAAACCTGCTTTGATTTCAAGGGTTTCTTAAGAAAATATTAAGATTTTTTAAGATTGTGCCAAAATGCCTTAATATTTTATTAAAACAAGCACGTTATCGGACGATGGCGGCTGAACAAAATGAATTTTTTCGAGGGCGGCCGGTTTTTTTGATTGCAAAAAAACGGCTTTTTCCTTTTTACATAATA

SEQ ID NO: 5257 - protein, 6304 aa, Artificial
  Synthetic
GCTGGGTTGGGATTGGGGTGGTTTTACTTCGCCCGCACCTACCGCCGAGCCGTGTGGGGGGCGGTGGCGGCTGTCGGCTGGCTTGCGGTTGTCTTGACTGCTCATTTTGCCCATCTTTTCAGCACATTCGGCGGTCTGGACTGGATTGCCGCCTCCCGAAACAAGTTTCTTTTTATCGGTTTTGCCCTCTGTTTCGGGCTGGTCGGCCCGCTGCCTCACCTGAACCGCCGATGGAAGCAGGCCTTTACGCTTGCGGTACTGGCGATTTTTGCGGTCTTGTTCATAGGAATCCCCTTCGTTGGGCCTGCCGTGTTTGGGCATCAAATAAGCCGTCTGCCGACGCATCTGGACCAAAACGGCATCTGCCGGCAATCCACTTCCTTTACCTGCGGGCCGGCGGCGGCCGTAAGCGTCCTGCACCGGCTGGGGCTGGAGGCCTCCGAGGGGGAGATTGCCCGCGCCTCCGGTACTGCACCGGCTCTGGGTACGGGAATCTGGGACCTCTACCAGGGTCTGCGGCGGCTCTATCCGCCTGAGCAGCTTCAATGCTGTTATCTGCGTGCAGGGTCCCTCGCGCATTTGCCCGAGGGGGAGTTTATCCTTGCCGTCATCCGCGAAACATTCTGGCTGGATCATTGCGTGGCCATCCTCGAAATCAGGCCGACATCGGTTATTTTTGCTGACCCGGTCAACGGCCTGTCCATCCTGCCCCGAAGTGCCTTTGAGGCGTGCTGGCGAAAGTCGGCTATCGTCCTTCGCCGGCCCGATTTGCACACGGCCGGCCTTTGAAATTTTGCCTTTTTCCCTGCCGGCCGGCTCTTTGCAAGGGGCTGCTTGTTTGGTATAATCTCCGCTGACCATTTATGTTATGGGAGATTTGATTATGAAATTGCCGAAGATTGAAAATGCCCCCCGCTATGCCGGCCTGTATATCGTGGATTTTGGAGACCACTGCGGGGTCGGCTTCCTGGCCGAAGAGGTCGCCGAACTGCTCGAGAGCGAACGCTTCCAGCACATCACCGTTTACAAAATATACAATGCCTACCCTGATGGGACCCTCGAAATCATAGGAGTCCGTAAGGAAATCTTTCAGCAGGAAAGCGGGATGTTCTTTTATGCCTTTGACGAGGAGACGGCTCGGGCGGATTTTGCCCGGCTTGCGGAATGTTCCCGTCGCCTGGAGCCGCCCTCACGTGCGAAAATCCAACTGGCGGAACTCGCCCCGCGGCAGTATGCAACCGCCCTGATTTATCCGGCCGAATATGATGCCGAATTCAGCCGCTGGCTGCTCGATTGCCGCTACCGAACTGAAGGCCCGGCCGCCGGCGGGGTCAGTGCGGTCGAACAGTATTACCGCCAAAAACCGGCCATTCTCGAAAGCACCCAGATTTTTAACAGTACCTCTGCAGCTTTCCACGGCGAAAATCTGCTGGAGGCGGCCAAAAAGGCGATGGTCCGATGACCCGGACGAACCCCGCCAAAAAACGCCTTCTTGGGGCGATTGCCGGCCTTTTTATCGGAGCCAAAAAGCCCGCTGCGGACTCAGAATCCGACAAAATGGACCATTTCAAAAGCAGCACCCAGCGGATAGGGGTTCGATTTTCTGAGAAAATCCGCTCCGTTTTCCGGAAAAGGTGGATTAAAATTCACTGAGGTTTTTCTCATTTTTCTCTTGACAACGTCCCATAAAATTCCTAATTTCTGGCATCTAAACGCCTTATTTGGCGGTTTTTTGCGGAAAACCGCCGATAGAGGACCGGGGAGTTTCGTTCGAGCAATTTTTTATTAAAGATTTCAGATATGCCTTGCCGAAACAGCAAGAGCAAGAGTTTTCTCCCCTCCGGAAAACATCAGGAAATTAGGGTTTCCTGATGTTTTCTTTTTTGCGCACCGGACCGGATTACGATTTGGGCAGAGTGTACTTGGAAATATCGCCGCCCTTTTCCTTGATAGAGTCCAGATAGACATGGAGCCGCTCCGTCAGTTGGCTGATGGTGCCGGTCAGTTTTGTAATGTCATCCTGAAGGGCCTTGGCCTTTTCGCCCATCTTCTCGGCCAGCGGAATCGCGGAAAATTGATCCATCAGTTTCTGGAGTTCGGACTGTTTGGCCGCGATTTCATCGACATACTTCTGGGCCGTCTTTTCCAGAGATGCGAGATCCATTTTTGCCGCGGCCTCTTTCAGGGACTCGATGGAGGCAGACAGGTCGATGCCGGCTGTCGAACCGGCCCGGCCGCCGGATTCCTTTTTGCTGCAGCCGCCGGCGGCCATCAGCAGAATGGCTAACCCGGTAAGAATCCAATTCTTCATACAACAACTCCTTTCTTTGAAATGTTGGTTCACCCGCCGTCGAAGGTTCGCAGCGGCGCCGTTTTGTTCAGCGTATCCAACCTCTTGTTTTTTCGCAAGATATTATTTCCCGCCCCGGCTTGCTTCAGAACAAGCAGAGTCCTCCAGGATCCTTGAGCCATTCCAACTTACACAGTTTATTTCACTTCCTCAGTTTCCAGGTTCCATCCTCTGCATAATTGGAACTATAGGGTAAGCCAAATGCATTCCATACTGAATCAAATATCGGCCTCATAAAAGACGGGACTTCTTCATTGTAACTGCCCACTTCTACTTCAGGAAAAATAACAACATCTTTTTCTATTGGAACATCAAATTGCATATGGGATTTTGTGTCTAAATAAGCACCTTTGCATCCGAGCAACGCCGCTGAAATTATAAAAGGAGCTTCTATGCCTAATTTTTTATATCCTTCAAAATACCTTTCGATAGACGTCACTATGTCTCGTTCAAAATCTTGACTTGGCAGGAAATTTCTCAATCTCCCTGGATAAAGGATATCAGAACGGACCGCTTCTACAGCGCCATTAAAAAACACAAGACAATAGCTGCTCCTCCCCTCATGATCCCTGCCATAGGTTAAGAAGCCATCAAGATTATATCGATAACCGGAACAACTACCATTTAATGGTCTAAAAGAATCCAAAAATTTGTTATAAAATCTTAGGTCCAGTCGTTGACGGTTGAGAAATGGATACAGCGGTATAACATGCAGAATCAAGCGATCTTTTGACAGCGGTAGCGGTGTTTCATCAGCCATAATCGCGGCTAACCGATCCTGCAAAAAATTGCGGATTCGCTCTGCCTGCGACTCCGTAGCCAAAAAAGCACTTCTTATTTCATGAACATCCAGCGGAGATTTGCCTCCCGAATTTCGAGCATAGAAACGGGAGTGCCCTCCCAAAGTTACCATATGGGGTGATGCAAAACTTTTGGGAATACGAACAAGAAGAACAAAACCTTTTCCGTCATCGCCAAAGCCATCGATTGTCTTGATTTGAACCCGAACGCGGGGTTCAATGCCGTTACGGATCAGATCTTCAAGACGCCGCTTTGCCTCATCTGCGGTTATGTCTTGAAGAGGAACTACTGAATCAGGTTCGCCTGTTTTTTGGCTATTTTCTTCGAGTGTTCCTTCAGGTGTTTCTTCGACTGTTTCTTTAACCGCTTCTTTAATACCGTATATAATATCGCCGCCCGAGGCGTTCGCAAATGAAGAGATATCTGCCAGAAATTTCTTCTCATCAGAGTCTCGACGGCCGGGAAGTTTTAATTTGTATTCAAGGGTCTTGCTTTCGGCGATTTTGTTTTCTATCAGCCAATCAATGTCTTCTTTTGTTATTTCATCAAAATTTTTCTGTATCATGGTACCTCCTTTTGCTGTTTTTCCGGTATCCTTTTTCCTTCGTTCGTCTCCTGTGGGCCGGAGGGTTTATAATGGCTCCGGCTGGTTTAGTTTATCTTCTGTTTGGCTTTTTTGCAAGATGCGGGGGTTCCAGTGCTGATTTTGGCGAGGAATTGTCCTTTTTTCAGTTTTCAAACACCGAACCTGGACTGCCGGCGGAAAAAGCCCGACGAAAGGAGATTAGACGGGTCGGGAAATCGACGGCAAGGGGCAAGGCATCAGGATTTTTCTTCAGCGGTCCCCAGGGAAATGGGAGAATAAAGAGGTGTTGTGTCCTGAACCGGCCGGCGGCAAACTCTTTTTCCAATAAATTTTTAAAAAAATCAAAATTTCTCTTGCAAATCGAAGGGAATGCCGATATATTACCTTGTGGATTGATGCTCTTTTTCTATACCCTATTCAATGGGTCAGGACGCAGGTTGATAACCTTGGTTCTATTTAATTTAGGATTGTGCGTCTGGCCCAAGGCAGATATGTCTCTCATATCTGCCTTTTTTTTGCGCCCTGCGTGTTTGCCCCCGTTCAGACTGTCTGTCTTCCGTATTCCGTCAGATAAACCGCCATCAGAATATGCCGCAGCCGCTCATCGGTCTGGCCTTCCAGGTAGTCTTCGGTAAAGTCCAGTTTTAACCGCCCCTGAAAATGGAGCAGGCGCTCCTTTAATTCGCAGCGGCTCATCGAGGCAATCTGAACGCTTATGGCTTCATAATTATTCTCAAAACTCATGGCTTCCTCCAGTACAATTTCGCAAGCAGGTACGCCTGTTGTATCGTTCCTTTCGGGCCGGCGGTTTATGTGCCGCCGGACAAATTCGCCGCTTCAGCCCGCGGGGGCGCAGGGCCGGCCGCTATAGACGCTACAGCCCTTTTAAAGGAAAATATCATTGTCTCCGCCCGTCGGCGGTGATAAGGTTTCTGCCCTATGAGAACAGACCAACTGGAGTATGACCTGCCGGAAGAATTGATTGCTCAGCATCCGGCCCAACGGCGTCCGCAGTCGCGGCTGCTGGTGCTTCACCGCGCCGACGGCCGGCTCGAAGACCGCCATTTTTGCGACCTGCCTGAGTATCTCCAGCCGGGCGATTGTCTGGTTCTCAACGATACCAAAGTCCTGCCGGCCCGCTTTTTCTGCCGAAAACAAACCGGTGCCAGGATAGAGGGGCTTTTTCTTGAAGAAACACCGGACGGCAGCTGGAAGGTCCTGCTGAAAAACGCACGCAAACTTAAACCCGGCAGCCGACTGACATTTCTCGATCGGCAGGGACGGCAATGGGAAACGCTGCAAATTCAGGAAAAACTCGAAGAGGGGCAATGGCTCCTCCGGCCCGACACGCAGAAACCGCCGCAGGCCATCCTCGAACACATCGGCTCAGCTCCCCTGCCCCCTTATATCCGGCGTCCGGCCTTTCGGCAGGAGCCGCAGGAGGATTTGGCCCGCTATCAAACCGTTTATGCTTGCCGGCCGGGCGCCGTGGCCGCCCCGACGGCCGGGCTGCACTTTGACAGACCCCTTCTTCAGCAGTTGGAGCAGAAGGGCATCCGCATCGCCTGCCTGACCCTGCATGTAGGAATCGGCACCTTTCGGCCTGTGCAGACCGAAACGCTCGAGGAACACACCATGCACAGCGAACGATACGAAATCAGCCCGCAGGCGGCTCAACAGATCAATGCCGCCGCTGAAGAAGGCCGACGAATTATCGCCGTGGGCACAACCTGCGTGCGCACCCTTGAGACCGTCGCAGAAAATCGAAGAGTCCGGCCGGCCGCCGGCCAAACTGCCCTCTTCATCCAGCCGGGCTATTCATTCAAAATCGTGGACGCCCTCATTACAAATTTTCACCTGCCCCGCTCCACGCTGCTGGCTTTGACGGCCGCCTTCGCCGGATTGGAAACCATCCTCAGCGCCTACCGCCGCGCCGTCCAATTGCGATACCGCTTCTACTCCTACGGCGACGCCATGCTCATCCTTTAAACCCCTGCAAGGCAACCCCCTCTAAAGTTAATCAAAAAGGGACTGTTTACCCTTGGATGCCGCACTTTTATTAGTGGTCCCATCAATCACTTTTAGTAATGACCAGTACCCACGGCCTGATTTTTCAGTTAAAATAGCAAGGGCATCTCTCTTTTTATTCCCTTCTCTCCGAAGCGATTCGTATTCACGGCGCAAAAAATCTCTTTCATGAGCGGTGATTGGTCTGCCTTGATTATAATATGTGTTTGGCGGCGGTGTGCGCACTTCGGACAGCAATGAACCTGGAATTATTTTCTCCATTTGCTTGATTTGATAATCGAAAGCAACTTTACTCTTCTCAAAACCTGCGGCCTTTCTATTCAAACCTATGGCAACTTTAGCCGTGGAAAAACTGCCCAAAAAAAAGTCGCAAACCAACTCCCCCGGATTGCTTGAATACTGGATCATCTTGATGAGAAGCTGGGTGGGAAGCTCGTTTTTGTTTTTTACTTTTCCCGGCTTGTATTCTCGATTAATAATCCAAACATCCTCACGGTCCTTATAGTTGAGCGCTCCCTCTTCATCCCTTTCGCTGTCCG

SEQ ID NO: 5258 - protein, 3654 aa, Artificial
  Synthetic
CCCCCCATCGAACGCTGTGATTACCCTGCAAATCGAGGGCTGCTCCAGCATAAGTGCTGGTATCCGTACACGGGACGGTGCTGTGATTACCCTGCAAATCGAGGGCTGCTCCAGCCGCCAAGATTAACGGACAGGATGTCTACTGGCTGTGATTACCCTGCAAATCGAGGGCTGCTCCAGCCGCTCTATCGCAAGGTATTATCTCAATTCCATTTATGGCAATATTTAACAGTAAATTTCTGTATAGAGCAATCACTTTTGCTTTTTATCTCGCCGTTTTTTTGTGTCGTCTTTTCGTTCGACAATCGGAAAGTATTTCTGAAAAATCGCCTGCTGATCTTCTGTTGACTTAAATTCCTCATGAAAAAAATCATTTCTGCCGCGATTCAGAGCCTCCTTGTCTTTGCCTGTATCTTTTATTTTACCTTGTTTTACCGCCTCGTCAAGAATATTGCAAAATGGAAAGTATCTCTCATGACTCCATTTATCCTCTTGTATTTTTAAACCTTCCTCAAACGCAAATATCGCACGCACAGCCTCGGCCTGCCGCTTTCTGTATTTTGCAATGCCGTCTTTATTGAATTTATCCCAGGTTATCTTCTTTTCGGCACCCGAATTGAGTTTTTTGTTTCCGAGCACAAAACACTGGCAAATATTTTCTATCATCGCAGGTTTTTCAATGATATCCAGTCGCAAAAAATCCGCCGGCGTAAATTGTATGACAACCCCGCAGCCTGTCTTATACCACAGCGAATATCGCTCATAACCCATATTTCCCTGCCCAATACAATTCCATTCCAATTTATTCCTGAATTCAGTCGCGGAGATTAATTTCTCATAATGCCACATCGCCATCTTCATACAGAGAACATCTTGTATATAGGTGTTGCACATCTGTCGGATAATCCTGCTGTGTTTATTGTCATAGTTCTTCGGATTCCTGTCGATAAGATACCACCGGTCATCGTGTATGGGCTTGATGTCCTTGAGTTTTTCTTTCACAATGCTATACAGACTTTTTCGCTCTTTCGCTTGTGTATTGTAACCTTTTTCTTCGTCAAAGCACCGCTTTTGACAACAATCGCCATAAAACATTTTCCGCAAAAAGTTTTTCCCGATAGAAAACTGCGACTCCAGAAATCGCTTGGCCTTTTCCTGCAGTGTGTTCCACTCTCCGTACTTCGGATGTTTTTCCTGCGCTTCAAGCCCAATATAACGCCTCAGCTCGGAGCCATTCTTTGCCTCCAGCCCAGCCAGTCTTTCAAGTGTCAGTTCGCAGACTTTTTTACAAAGCCCGCTGATGTCATTGACACCCTTGATCTGATCGTATAATGAAACCGCAATCCGGCCGTCATTGACGTAATTTTGAAGTTCCTTATAAAATCCATCAAAGTCGAGCCTCTGAAGCGCATCGCGTAAAATATGATATTGTTTCACATTCGGCCGCCTTTGAATATCGCGAATGCTGTCGGAGATAAACTTCAGTATCATTGATATTTTTTTGCCTTTGTATATCAGCCACTTATTATTCCGCGGCTCTTCCTGACCGATTTTCTCTATCGTCTCCTGAAGTTGTTTGCGAATATAGCTTAACCGGCTCTGCACTGCCTCCGGCGTAACCGTCCTGTCGGCACGCTTGGTAAACGACGGCATCCATCGCTCATCCTCCGGCCTGTGTTTCCATTCGCCCTCGATTTTTTGGCTCATACTGTAAATATAACAATTCAGCTTTTGGACGGCGTCATTGCCCTTCTCCTCAAAAATCAGCAGCACCAGATATTTTAATTCATTTTCAGAAATACGGGCAGCAACGGCTTTTTTATTATTCAGTTTAATCTGGATAATTGCGTGTTCATTCTGAATGTAATACATCCATTCGTTATTGAAATCCGGATTGAGTCCTTGGTTTCTGTATTTTAATTGCACCGCTCTGGCCTGTTTGCCATCCTGATTCTTATTCTCCGCTTTTTCCACTGTTTTTTGGTAGCGTGCAAATGTCACATCTAATCCCTGTTCAGCCGCCCACCCCTCAATAAATTGGATAGCAAATAAAATGAATTTTTCATCTCTGCGGAGACTACGCCTCTTTTCTTTGCTTTTTTTATTTTTATCACTGGACGAAGAGTCCGAAATATCCCCGCCCTCATCTTCGGCGGGTTGATTCAAAAAAGCTTCTTTTTCTTCTGGTGTAAGCAGCTGTTGTTCATTCAGCCAATCTACTGCCAATTGCGGTACTCTCGACAAATAGCTTAATATCTCGCGGAAACATCGTGTCTTGTCTTCCGCCCCCACAGAATAGCTGTCCCGGAGCGCATAATAAGCCAGCAGCCGGCGAGTGAAACCATAATCTCGTTTCTGCCCATCGCTCAATTGCTCTTTTCCGGTATGTTTAAATCCTTTCACCGCTCCCAGCATCCGATAGACATTACTCCGATGGCAGAAAAATGATGCCAGAAAAATAACCCCCGCCGCCGTAATCATATATGTACCGTTATGCAATTCAAATAATGGCGGCACAACGCCTTTATAGTCGCTTTCTTTTGTCGCTCCGACAGTCTTTGATTCCGCGTTCTTGTATATTTCTTCCAGAAAAACCTTGACGGCATCTTGGTCTCCAAACCGCAGACAGTCTTCTGCGTGGTAATAATGCGAGAAATAATTGCGAATGTCTTTAAGTCGCTTCTGAATTCCATCCACTACTTGTGATTTTATTTGCTCATCAGAAATCCCTCCCTTGCTGCGCAGCACCTCACTCAGAAGAGTCCTACATCCTTTATGATCACAGTTATCATATGCAATATTCAAAGCAACTGCAAAACAAGACTTGTTGATGCCTCGATAACAGTCACTTGTAAGCGAATAATCAATACCCATAATGGCTCCTTAAATAGTTTAAAAGCTGATAGAATAACTTATATTCTCTCATATATTGTTTTTATGTGTTTGAACATCGTATACATATTCTGCCCTTAAATTACTTCAGCCCGTGATGGTGATACACAACTCGATTCGATGCTGCCGTCCGGCACAAATGTACTGTTTCAGTACAACCGATTTAAAAATGCCCCCGAATTATATAAAATCTCCCTCTGCTATACAAACAATATTTCCCACATATCAACTCCACTTCCCCCCCACAAATTCCAAATGCTCAACTTAAAATTCCCACCTCTTCAAATCGACAATCTGCCCCCCGCCTCCTTGAATTCTTGTGTTCTTGAGTTCTTGTGTTCTTTTATCTTTTAATTTTCTAAATTATTTAAAAATTATAAGCAACTTTTCCTCCCCATCCGACATATATATAGGGCCTGCTCAGGAAGGACAGGCAGAAAAAAATAAGGGCTAAAAAGGAGCTGCAAAAGGGCTAAAAGGAGGCTGCAATGAACAGAAAAAAATCAAACCAAAACCTGCATACGTATATACCTATATACTTACATACCATTATCCTGTTAATTCCCTAAATCCCGTCCAAAAGGAATTTTATCGAAACATATCCATTCCATACAGCATCTGAATGGCATAGTATTGACTGAACACAAAAGCGATAAAAATGGAGACAGAACTGATGAAATGGTTTACAGTGGGTTTGGTTTGCCTTGCGGGAACGATTGCCCAGGCGGAAAAGCAGCTTGTGGATTATGTTAATCCGTTTCT

SEQ ID NO: 5259 - protein, 7627 aa, Artificial
  Synthetic
AACCGCAAAGCTGCTCGCAGCCATCGACGCCGCACAATAAGACGATTACATACGATAGGCATAAAATTGAAAAACATACGCAAATGTCACTGGAATTCCTTGTAGCGTTGTAGTACTAGTTTTCCTCGCCGGTTTTCTGGTATTCCGCCTTGGCCTTTTGGTAGGCATCCTTAAGCTCTTCTATAGCCGTATTGAATGCATTATTGGTTTTTTGCAGATTCTCATCTCCAGCTTCCTTGAGTTCGGCGAGCTTCTGTTGCGTAGCGTTCAGTTTGCTGTCAAGATTAGAGCTTAGTTTTTGCCAGTTTTCTTTTCCTGCTTCCTTCATATCTGCCATCAACTGCTGAGTGTCATTTTTTAATTGATCATAAGTAGTATTAGCTTTTTTCAAAATGGCCTCCTTTTGTTCGTTTAGATACGTTCCGGTAGCCTCGGCCGCCTCGGAGATTTCCTCTTTAACCTGATTAGCATCGGCCGAGCTCGATGTTCCGGAATCCTGCTTTTTGCATCCCAAAGGCAAAATAACGAAACTCAATATCAGTAACAAAATCTTCATAGTTTTCATGATCTACTCCTTTAAAAATAATATTCTTTTCTTTTACACCTTATCATTTTTATAAAAACTCACGAAAAATGCCAATAAGGAATTTACTGATTTGGTATCAGTTATATACTGATTTTAACCGCCAAGTAAATCAGACGCTGGCAGTAATTAGCCGGGGCCGAAGTGCTTTTTCTTTTTGATACTGCTACGGTCAATCCCTAATTTTAATTAATGAAAATTGCCACAGAGCGCAACGAGTATTCAGAGAAATCGAAACAGGTAGGGTGGGCCTCGGCCCACCGATCAAAGCTTATCGAAAATGTACCCCCTGTGGAGCAGGCATACGCCTTTAATTTACCCTGAGAATCTTCGTTAAAGCTTAAAGAAAGGGCTGAACCTCAAAATCCCTCCCCAAAATCCCTCCCATACTTTCAAAATTTCTAATGTTCCACGGTCTTCAAGATTTTTTGTCTTCCTCAAGGCCATTGGAAAACTCCGTCTTCGTATCTTTGAATAGATGTTTGATACCATTCCATATTTCTTCGGTACCTTCTTTAAGCTCTTCCCAGCCAATGTTATCTGATTCCTGAATCTGTTTTATTTTTTCTTTAGCTGACTTGCACTTCTTGCGCAACAGTTCAATTCGTTTTTCAAAATCCTCTTTTATATCTGCTTTTGCTCGTAGAGCATCTGTTTTCAAAACTTTAATTTCAGACTCCCACTCGTCCAACTGTTGTTGCAATTTCTTTATATAATCTTCACGAGAGGTCATAATGTAGGCTCCTTTCTTAAGCTTTGAGCTTTGCAATCATTACGTATTGATAAGGCAAACATTATCATGGGGAGGGCGAGGAGAGGGGGACAGTCACCTATTAATGTCTGTCTGTCCACGACTCTAAGCTCCTCTTTTCACTCTATTGTTCCTGTGACTCGGACTTGTCCTCCTTTTCTTTTTCGAGCTCTTCTTCGACCTTGGCGTCGAATTCGTCCATATCCTTCTCCGATCGAGCCTTGGTCTGCTCCTGTGCCTCAGTTTTGCGCTGGGCTTCCGTATCTTCGTTTGCTTGGAGTTCCGTTTGGGGCTCCGGCACGGGTACATCCTTCTTTTCCGGTATGATGAGCTCTTGCTTACATTTGGGGCACACCGTTTTTCTGCCGGCGGAATCTTCAGGGGCTTTGACCCCCTTTTTACAGTGCGGGCATTCGAAATGAATAGCCATTTTATCTCTCCTTATCTGCCTGTGTTTGATTGACCAACACTTCCCATATAAATTTCACTAAAAACTTCTGCATACTTCAAATGTATAATGCTTATTATAATGCGGTAATTTTATTCGAAGTTCAACAATAATGCCGCGGAATTAAATATTTTTCTTTCTTGTCTTAGTCCAAGTCACGCAGTTATGAGGTTGGATAGAGCTTTTTGATAGCGCCAGGGGCGATTTATGCAAAAAGTCTTCAATACATTTGAGGGAGTATAGGGAGTATTAGGGTCAGCCCTTAATTTTATGGACAGTCACCCTTTTTGGAATTGCAAACAGCCATTAATAGGTTGACTGTCCCTAGTTTTTTATATTGTGTTTTTGTAAAAAACTTGACTATGAAGACCAAAAGAAACGAAAATGTAGAAATTAGAACAAGTGAGAAAGGACTAGAAAATGAAGAAAGCTAAAATCGTTCTGATCTTAGTTATTTTGTTGTTGGCTTTGGTTGTGTCTCTTCAAAATACAGAGGCTGTCGAAACCAAATTTCTGCTAATGACGATCACAATGCCTCGGGTAATTCTGCTTTTATTGACCTTTACGCTCGGATTTGTCGGAGGTATTATTACAGCCAGTTTCATTCTCAAGAAATCAGGTAAGCCTCAAGAGAAAATCAAAGCAGCGCGAGAGTGAAAGTGTATGTCGAATTGAACAGAATGTCCAATAACTATAACTAAGGACATGGATTAAAGCTGATTGTTATTATGGACTGTCACAATTTTTGGAACTGAAAACAGCCATTAATAGGTGAATGTCCCTAGTTTTCCAATAGCAGCAAACGGGAAGGTAGTCAATCATTATTTATATTTTAAGGGCTGGCCCCTATGACTTTCCCAGAGAAAGAATATGTAGGATGGCGCAGCTTTGCTGCCCATGCTGATTTTTGACACGGATTAACGCTGTTTAACACGGTTTAGGATTTGCCGCAGAGCACATCAAGGACACTGAGAAATATTAAATTACAATAGTAAGTTTATGGCTTAGCCATAGAAAATAGAAAATTTATGCCACTTGTGCCACAGGTATAGGTATCGTAAATGTCAAATCGGTGTCTGAAACCTTTAATTTTCCCGAAGGAAGTCAATCATTATTTATATTTTAAGGGCTGGCCCCCTATGCCTCCACAGCTTTCTACTTCTCCCGATAAGGTTGAGCACCGCTGTTACTTCCCCACAAATTGAGGCCCATCACAGCCTGTCAATATCGACGTCGATTGCAAAAAGAGCTGTTACTTCCCCACAAATTGAGGCCCATCACAGCTCACTCTTGGTAAACCATACTCAATAGACTGCTGTTACTTCCCCACAAATTGAGGCCCATCACAGCGGAGTAACATGGCAGAGACAGGATATAATTGCTGTTACTTCCCCACAAATTGAGGCCCATCACAGCAATAATAATATCATTAAACGATAAATTCGCGCTGTTACTTCCCCACAAATTGAGGCCCATCACAGCATAATCCCTGGAGAGGAGAAAGAGTTCACTGCTGTTACTTCCCCACAAATTGAGGCCCATCACAGCGACTATGTGCTGTACGAGGCAGATAGCTTCGCTGTTACTTCCCCACAAATTGAGGCCCATCACAGCATCACCTTATAAGTAACAATACACCAATAAGCTGTTACTTCCCCACAAATTGAGGCCCATCACAGCAATCAGCGGCTTGAGCGGCGCATCGGTACGGCTGTTACTTCCCCACAAATTGAGGCCCATCACAGCCATTGTATTTTAACCTTTTTATTGACAGATAGTTATCTTTAAGTTTGTTTTTCAAAAAGTACATATATATGCTTCTCATTCCGTCATTATTATCATTTTTTGATTTCATTTATCAATAGCTTTGCTTTTTCAAAAGAAGTCCCATCAGGAATCTCGCCGTGCAAGGCTTTATTCCTTGCATGTTTGAGTTTAGAGAGTTTTTCTGTGTCCCGTCCTTTTTTAATAAGCTCATCATGTATTTGTGTAAAACTTATATGAGTCTCCTCGTCATTAAATTTGCTTTTTTCGATAATCCTATTTTCGAAAATATATTCCTCAAAACAGAGAACTTGTTTGATAAATTCCATACGTTGCTTTTCTATGATATCCACTTTATCCAAAATAGCTTTTTTGGATTCGTAAGCCGCAAATGCATAACTATCGATATTGTCAACATATTTTCGGTTCATTGCATACACAAGCTTGGGGTAATAGGAAAGCGGGATATCTTCTTTTACCTTATCGGATATTTTATATGTCATCCTTGTTTGTTTAAGCTCGCCTAATTTTGTTTTCTCCTTTAATTCAAATCCAAGCCGCTCCAAAAGATAGATAACCATAAATGCGATAAGTTTGTTCTTTTCACAAAGGCCGTTTATCAGTGTCATCTTATCGAAATTCTTTTTATCAAAAAATTGCCTTGAAAGTTCTTCATATTTTCCCGATAGCTCAATTTTACAATAATCCTCTCTTATTCTTTTCGATATTTTCTCAGACGAATTTTGCTGGATATGATTCTTCACAAAACCTTTGGGCAAAGCTATCCTGTTCATAACCGTCTGCCTGCTTTTATTCGTGTCAATGCTTATTCTAAGATTAAGATTCTCGATGCCGTGCATTTTCTTTAGTTCAGCGGTAATCCTTTGTTTCATGATTGTAAGTTTCTGATTGTCTGATATCTGCTTCTTTATCTGCCCGGAATATTCAACCCAGTCCTTTTCCTGCCATTTCACACCTAACTCCTGTGACAGAAGCCTTAAATTCTCCAGGTCATTAACGTAATTAATCTGCTGATATTTTTCAAGGTCATTTTCTTTAAGGCTTCGTACTTGATTTCTCATATCTTCAAGTTTCTTTTTGTTCTCTTTCCGTGCTAATTGATAGGCTTCTTCTAGATTTCTTTTATTCCACAATTCCGTCGGCAAAAACCTCGTCCATTTTTTACTGTCAAACTCGCGCTTAATGTTATGCTTTTCCTTATTCCAGAAACGAACCATCTTTAAGTATCGTCTATAATCCTTTTGCCTCAACTTCTCATCAGACGGAAGGCACATATTGATAAATTCCATCACTTCAATCATTTTGTCATAAGCTTTATCCGTCACTTTAGATGTAGGATCCATCCTCTTATCAAGCCGGTTTAGAATCTTTTCTTTTAGGGTCCCTGTTCCTGCCCGGCCAAAGTAATTTGCAGGGAAATATTCTCTTTTAAGCAATTCATCTTCGTCAACTTGCTGCTTGCTGCTGACATTCTGAAATTTTTTGAGAAATTGTATAATTTTACCTTCCAAGGAATCAACGTTTTGCTTCTCAATTAAAATTGTGTAACAAAGCTCCTTCAATTGATCTTCACTAATCACTCCCTTATGTCCATTTAACGTAAAATAACTATTGCCTTGAAAAGGCTCTATCCATGTAAAGGTATCCTTTTCGTGTTTGAGTTCTCCTCTTTTCTCTTTTAGCCTGTTGCTCTGATATGTATAAAATTGCATTTTATTGAAGATGCCGCTCTCGTTTAAAAAAGTCGAAGCTATACGATGGAAAAACAAACCCTTACCGAGCTCGTCTGACTGCTGCTGCTTCTCAATATGATCATCCTGCTCAGATAGATGATTGACCAGAGCGAATAGAAGGAAATGCTTCTGCATATCAGGCACAACCTTATATCCCTCCCTCACACTATAATAAGTGAATAGATTTCTTCTCGGTTGTCCTTCTTTATCATTCCTTTTAAAACCACTAACGGAACTTATAAGCTTGTTTGCCTGTGATTTTTTTAAGAACATACACAGCAAAAACAGCACGCCAGAATCCGTGAGACAGTTGTTGTTTTCTATGATTACAAGTTTAACATTTTTACTTCCGGTTGCTTCTATAGCAATTTGATAATATTTTTCCAGTATAGGTTTTTCACCGTTACTTAGTATCTTGACGGTATCATTATGAACGTAATGTGAGTAAAAATTACGTAGCTCTACTAATTTCAACAATATAGCCTCAATTTCAGTTCTTGCGTTTTTAGCCACATCTTTAAAGTTGTAGATATAATTCTCCACACTTTTTAATAATAAGCGGTTATTGAAAATCTTATCAATCACTTTCTTTGCATTTTCCTTGTTGCTGATTATGTGCGGAATTTGTTTTTCAATAATTTCATCAAGCCCTGAAAGATTGAGGATCGTCTGATTAAAATAAAACGCAGCTTCTTCTTTTTTTAATTTAATGATGTTCATAATTAAATACCTCCATAACAACAAAGATTTTGTCAGGCGAAAAAACCAATTTTAAAAACGCTCTTACAAATACGAATATCCCTTATGATTTCTCAGAGCAGGCTCTTAAGTGGAGTTGAATGCGCAAACCCCTAGTAAGACTGATTAGGCGCGGTAAGACAAAATAAGGCGATTCGAGGAAGTTTTTCGTTCAGTGATTCTTTTCACCTCAACAAATATAATACACGAAAGAAAGTAAAAAGGCAAAAGTAAAAAAGAAAAAACTTTTTTTACAGGATAATGTCGGGGATGCTTTACTTATAGATAAAACTAAGTGATAGTCACCTATAAAATTTAAGTAACACGGTCTTATTAAAATACTCATTCTCGAAAGCTTGTATTCGACGAAATAAATAATAAAACAGAATACAGAACACAGGAGACAGAACCTTTCTATTAACGATTTTCGATTGACTATTGACTATTTTTTTTGTTAATCCGCGTTTATCTGCGTTCATCTGCGGTTTCCCATCTTCTATCCTATCCGTGGCCGTTTTATGGCCTATTCACTATATACAGCGTATCTCACGGGGTAAATGTTACCTATAAAATTGGAAAGTTTCGATTTTTAAGCAAAATAGTGAAAAAACACGAAGAACAGGCCTGAAACAAGTAAAAAGTTAAAAGGAAAAAGGGAAAATTTAGTCGATTCTTGATTCTGGAAGCGGTATTTAGCAGGGACAGTCCAGTTCTTTTATCAGCTTAAATTTGAGCATAATCGGGCGTTAACCAAACGGTTTAGACTGACATTCTCTTCAGCAGCCTCAATTGTGAGTTCACGATGCACCTCAGGAGGAACACGAACTACGAATTTACCACTGTACTGCTGGAAGCTTAGTGGTTTTGGTATCGGTTCTCCGTTTTTCTTCATATCTTTGATAACATCATCCACGACACGAATAATTCCCCCCACGGCTCTTTCGGGAGTAGAAGCCAAGTAACTTAGACTTGGGAATTCTGCACACAGACCGACAAATTCGGCATCATCTTCGGACCAAATTACCCTGTATGTATAATAATGCCTAATCTTTGGTTTTATTTTCTTCATAATTAAATAGTACTAATATTGATACTATAAGTCAATGAAAAAGTTCTAAAAATTTTAAAATAGTTCAATAATCGCGAAAAACAGGCCTGAAACAAGTAAAAAGTTAAAAGGAAAAAGGCAAAAAAGCGAGATAAAGGCAGAATTCAGGAGACAGGAGACAGAATACAGGGGAAAAATTAAAGGGAAAAATGCCTTGTAATTGATTATTTATTATTGTATATTGACTATTTCTCTGTACTTTCGGCGCCCTCTGTGGCCCTTTTAATTTTCTATTTTCTATTTACTATTGATTATTTTTGCGCAAAAAAAACGCTCCATGGAATCCACGGAGCGTTTTTATATCAAGAACAGTTAAGCCGACAGCGAAAATGCCTGACATACACCGGCTTTAGATTCATCGCTTTCGCTCAGAATGACATATGGCCGGGTTCTAGTATATCCCTAGAAAGGAGGTGATCCAGCCGCAGGTTCCCCTACGGCTACCTTGTTACGACTTAGTGCCAGTCATCGGGCTTACCGT

SEQ ID NO: 5260 - protein, 804 aa, Artificial; identical to SEQ ID NO: 4719
  Synthetic

SEQ ID NO: 5261 - protein, 802 aa, Artificial; identical to SEQ ID NO: 4714
  Synthetic

SEQ ID NO: 5262 - protein, 775 aa, Artificial; identical to SEQ ID NO: 4723
  Synthetic

SEQ ID NO: 5263 - protein, 841 aa, Artificial; identical to SEQ ID NO: 4667
  Synthetic

SEQ ID NO: 5264 - protein, 873 aa, Artificial; identical to SEQ ID NO: 4663
  Synthetic

SEQ ID NO: 5265 - protein, 799 aa, Artificial; identical to SEQ ID NO: 4763
  Synthetic

SEQ ID NO: 5266 - DNA, 36 bp, Riemerella anatipestifer
gttgggactgctctcactttgaagggtattcacaac

SEQ ID NO: 5267 - DNA, 36 bp, Prevotella sp.
gttgtggaaggtccagttttgaggggctattacaac

SEQ ID NO: 5268 - DNA, 36 bp, Artificial
  Synthetic
gctgtaatcaccccacaaatcggaggcttcttcagc

SEQ ID NO: 5269 - DNA, 36 bp, Artificial
  Synthetic
gctgtaatcaccccacaaatcgggggcttctccagc

SEQ ID NO: 5270 - DNA, 36 bp, Artificial
  Synthetic
gctgtaatcaccccacaaatcgggggctgctccagc

SEQ ID NO: 5271 - DNA, 36 bp, Artificial
  Synthetic
gctgttacttccccacaaattgaggcccatcacagc

SEQ ID NO: 5272 - DNA, 36 bp, Artificial
  Synthetic
gctgtgattaccctgcaaatcgagggctgctccagc

SEQ ID NO: 5273 - protein, 1095 aa, Artificial
  Synthetic
MEKPLLPNVYTLKHKFFWGAFLNIARHNAFITICHINEQLGLKTPSNDDKIVDVVCETWNNILNNDHDLLKKSQLTELILKHFPFLTAMCYHPPKKEGKKKGHQKEQQKEKESEAQSQAEALNPSKLIEALEILVNQLHSLRNYYSHYKHKKPDAEKDIFKHLYKAFDASLRMVKEDYKAHFTVNLTRDFAHLNRKGKNKQDNPDFNRYRFEKDGFFTESGLLFFTNLFLDKRDAYWMLKKVSGFKASHKQREKMTTEVFCRSRILLPKLRLESRYDHNQMLLDMLSELSRCPKLLYEKLSEENKKHFQVEADGFLDEIEEEQNPFKDTLIRHQDRFPYFALRYLDLNESFKSIRFQVDLGTYHYCIYDKKIGDEQEKRHLTRTLLSFGRLQDFTEINRPQEWKALTKDLDYKETSNQPFISKTTPHYHITDNKIGFRLGTSKELYPSLEIKDGANRIAKYPYNSGFVAHAFISVHELLPLMFYQHLTGKSEDLLKETVRHIQRIYKDFEEERINTIEDLEKANQGRLPLGAFPKQMLGLLQNKQPDLSEKAKIKIEKLIAETKLLSHRLNTKLKSSPKLGKRREKLIKTGVLADWLVKDFMRFQPVAYDAQNQPIKSSKANSTEFWFIRRALALYGGEKNRLEGYFKQTNLIGNTNPHPFLNKFNWKACRNLVDFYQQYLEQREKFLEAIKNQPWEPYQYCLLLKIPKENRKNLVKGWEQGGISLPRGLFTEAIRETLSEDLMLSKPIRKEIKKHGRVGFISRAITLYFKEKYQDKHQSFYNLSYKLEAKAPLLKREEHYEYWQQNKPQSPTESQRLELHTSDRWKDYLLYKRWQHLEKKLRLYRNQDVMLWLMTLELTKNHFKELNLNYHQLKLENLAVNVQEADAKLNPLNQTLPMVLPVKVYPATAFGEVQYHKTPIRTVYIREEHTKALKMGNFKALVKDRRLNGLFSFIKEENDTQKHPISQLRLRRELEIYQSLRVDAFKETLSLEEKLLNKHTSLSSLENEFRALLEEWKKEYAASSMVTDEHIAFIASVRNAFCHNQYPFYKEALHAPIPLFTVAQPTTEEKDGLGIAEALLKVLREYCEIVKSQI

SEQ ID NO: 5274 - protein, 1090 aa, Artificial
  Synthetic
MNIPALVENQKKYFGTYSVMAMLNAQTVLDHIQKVADIEGEQNENNENLWFHPVMSHLYNAKNGYDKQPEKTMFIIERLQSYFPFLKIMAENQREYSNGKYKQNRVEVNSNDIFEVLKRAFGVLKMYRDLTNHYKTYEEKLNDGCEFLTSTEQPLSGMINNYYTVALRNMNERYGYKTEDLAFIQDKRFKFVKDAYGKKKSQVNTGFFLSLQDYNGDTQKKLHLSGVGIALLICLFLDKQYINIFLSRLPIFSSYNAQSEERRIIIRSFGINSIKLPKDRIHSEKSNKSVAMDMLNEVKRCPDELFTTLSAEKQSRFRIISDDHNEVLMKRSSDRFVPLLLQYIDYGKLFDHIRFHVNMGKLRYLLKADKTCIDGQTRVRVIEQPLNGFGRLEEAETMRKQENGTFGNSGIRIRDFENMKRDDANPANYPYIVDTYTHYILENNKVEMFINDKEDSAPLLPVIEDDRYVVKTIPSCRMSTLEIPAMAFHMFLFGSKKTEKLIVDVHNRYKRLFQAMQKEEVTAENIASFGIAESDLPQKILDLISGNAHGKDVDAFIRLTVDDMLTDTERRIKRFKDDRKSIRSADNKMGKRGFKQISTGKLADFLAKDIVLFQPSVNDGENKITGLNYRIMQSAIAVYDSGDDYEAKQQFKLMFEKARLIGKGTTEPHPFLYKVFARSIPANAVEFYERYLIERKFYLTGLSNEIKKGNRVDVPFIRRDQNKWKTPAMKTLGRIYSEDLPVELPRQMFDNEIKSHLKSLPQMEGIDFNNANVTYLIAEYMKRVLDDDFQTFYQWNRNYRYMDMLKGEYDRKGSLQHCFTSVEEREGLWKERASRTERYRKQASNKIRSNRQMRNASSEEIETILDKRLSNSRNEYQKSEKVIRRYRVQDALLFLLAKKTLTELADFDGERFKLKEIMPDAEKGILSEIMPMSFTFEKGGKKYTITSEGMKLKNYGDFFVLASDKRIGNLLELVGSDIVSKEDIMEEFNKYDQCRPEISSIVFNLEKWAFDTYPELSARVDREEKVDFKSILKILLNNKNINKEQSDILRKIRNAFDHNNYPDKGVVEIKALPEIAMSIKKAFGEYAIMK

SEQ ID NO: 5275 - protein, 804 aa, Artificial
  Synthetic
MEFENIKKTSNKEVYSIEQYEGEKKWCFAIVLNRAQTNLEENPKLFEQTLTRFEKIMKQDWFNEETKKLIYEKEEENKVKEEIQIAASERLKNLANYFSAYLHAPDCLIFNRNDTIRIIMEKAYEKSRFEAKKKQQEDISIEFPELFEEEDKITSAGVVFFVSFFIERRFLNRLMGYVQGFRKTEGEYNITRQVFSKYCLKDSYSVQAQDHDAVMFRDILGYLSRVPTEIYQHIKLTRKRSQDQLSERKTDKFILFALKYLEDYGLKDLADYTACFARSKIKRENEDTKETDGNKHKFHREKPVVEIHFDKEKQDQFYIKRNNVILKAQKKGGQSNVFRMGVYELKYLVLLSLLGKAEEAIQRIDRYISSLKKQLPYLDKISNEEIQKSINFLPRFVRSRLGLLQVDDEKRLKTRLEYVKAKWTDKKEGSRKLELHRKGRDILRYINERCDRPLSRKEYNNILKFIVNKDFAGFYNELEELKRTRRLDKNIIQKLSGHTTLNALHERVCDLVLQELGSLQSENLKEYIGLIPKEEKEVTFREKVDRILEQPVVYKGFLRYEFFKEDKKSFARLVEEAIKTKWSDFDIPLGEEYYNIPSLDRFDRTNKKLYETLAMDRLCLMMARQYYLRLNEKLAEKAQHIYWKKEDGREVIIFKFQNPKEQKKSFSIRFSILDYTKMYVMDDPEFLSRLWEYFIPKEAKEIDYHKHYARAFDKYTNLQKEGIDAILKLEGRIIERRKIKPAKNYIEFQEIMNRSGYNNDQQVALKRVANALLAYNLNFEREHLKRFYGVVKREGIEKKWSLIV

SEQ ID NO: 5276 - protein, 802 aa, Artificial; identical to SEQ ID NO: 4714
  Synthetic

SEQ ID NO: 5277 - protein, 775 aa, Artificial
  Synthetic
MAQVSKQTSKKRELSIDEYQGARKWCFTIAFNKALVNRDKNDGLFVESLLRHEKYSKHDWYDEDTRALIKCSTQAANAKAEALANYFSAYRHSPGCLTFTAEDELRTIMERAYERAIFECRRRETEVIIEFPSLFEGDRITTAGVVFFVSFFVERRVLDRLYGAVSGLKKNEGQYKLTRKALSMYCLKDSRFTKAWDKRVLLFRDILAQLGRIPAEAYEYYHGEQGDKKRANDNEGTNPKRHKDKFIEFALHYLEAQHSEICFGRRHIVREEAGAGDEHKKHRTKGKVVVDFSKKDEDQSYYISKNNVIVRIDKNAGPRSYRMGLNELKYLVLLSLQGKGDDAIAKLYRYRQHVENILDVVKVTDKDNHVFLPRFVLEQHGIGRKAFKQRIDGRVKHVRGVWEKKKAATNEMTLHEKARDILQYVNENCTRSFNPGEYNRLLVCLVGKDVENFQAGLKRLQLAERIDGRVYSIFAQTSTINEMHQVVCDQILNRLCRIGDQKLYDYVGLGKKDEIDYKQKVAWFKEHISIRRGFLRKKFWYDSKKGFAKLVEEHLESGGGQRDVGLDKKYYHIDAIGRFEGANPALYETLARDRLCLMMAQYFLGSVRKELGNKIVWSNDSIELPVEGSVGNEKSIVFSVSDYGKLYVLDDAEFLGRICEYFMPHEKGKIRYHTVYEKGFRAYNDLQKKCVEAVLAFEEKVVKAKKMSEKEGAHYIDFREILAQTMCKEAEKTAVNKVARAFFAHHLKFVIDEFGLFSDVMKKYGIEKEWKFPVK

SEQ ID NO: 5278 - protein, 799 aa, Artificial; identical to SEQ ID NO: 4763
  Synthetic

SEQ ID NO: 5279 - protein, 873 aa, Artificial; identical to SEQ ID NO: 4663
  Synthetic

SEQ ID NO: 5280 - DNA, 84 bp, Artificial
  Synthetic
tgccgggcctcttgcgggattttacactttatgcttccggctcgtatgttaggaggtctttatcatggaattcgagaacatcaa

SEQ ID NO: 5281 - DNA, 40 bp, Artificial
  Synthetic
atgctgtcggaatggacgattcacacgatcagggaccatt

SEQ ID NO: 5282 - DNA, 84 bp, Artificial
  Synthetic
tgccgggcctcttgcgggattttacactttatgcttccggctcgtatgttaggaggtctttatcatgcaggtcgagaacatcaa

SEQ ID NO: 5283 - DNA, 40 bp, Artificial
  Synthetic
atgctgtcggaatggacgattcacacagccagggaccatc

SEQ ID NO: 5284 - DNA, 84 bp, Artificial
  Synthetic
tgccgggcctcttgcgggattttacactttatgcttccggctcgtatgttaggaggtctttatcatggcccaggtgtccaagca

SEQ ID NO: 5285 - DNA, 40 bp, Artificial
  Synthetic
atgctgtcggaatggacgattcacttcacggggaacttcc

SEQ ID NO: 5286 - DNA, 84 bp, Artificial
  Synthetic
tgccgggcctcttgcgggattttacactttatgcttccggctcgtatgttaggaggtctttatcatgaacatcatcaagctgaa

SEQ ID NO: 5287 - DNA, 40 bp, Artificial
  Synthetic
atgctgtcggaatggacgatttacttcttaatctcattga

SEQ ID NO: 5288 - DNA, 84 bp, Artificial
  Synthetic
tgccgggcctcttgcgggattttacactttatgcttccggctcgtatgttaggaggtctttatcatgggcatcgattacagcct

SEQ ID NO: 5289 - DNA, 40 bp, Artificial
  Synthetic
atgctgtcggaatggacgatttacttctgcttcttgtctc

SEQ ID NO: 5290 - DNA, 43 bp, Artificial
  Synthetic
tgccgggcctcttgcgggatatcttgacagctagctcagtcct

SEQ ID NO: 5291 - DNA, 40 bp, Artificial
  Synthetic
gcgtccggcgtagaggatccgctgtaatcaccccacaaat

SEQ ID NO: 5292 - DNA, 40 bp, Artificial; identical to SEQ ID NO: 5291
  Synthetic

SEQ ID NO: 5293 - DNA, 40 bp, Artificial; identical to SEQ ID NO: 5291
  Synthetic

SEQ ID NO: 5294 - DNA, 40 bp, Artificial
  Synthetic
gcgtccggcgtagaggatccgctgttacttccccacaaat

SEQ ID NO: 5295 - DNA, 40 bp, Artificial
  Synthetic
gcgtccggcgtagaggatccgctgtgattaccctgcaaat

SEQ ID NO: 5296 - DNA, 30 bp, Artificial
  Synthetic
gaccgagcgcagcgagtcagtgagcgagga

SEQ ID NO: 5297 - DNA, 127 bp, Artificial
  Synthetic
aacgacggccagtgaattcgagctcggtaccaaaaaagctgtaatcaccccacaaatcggaggcttcttcagcttgtcttcgtcccaggaagacatggtgtttcgtcctttccacaagatatataaa

SEQ ID NO: 5298 - DNA, 127 bp, Artificial
  Synthetic
aacgacggccagtgaattcgagctcggtaccaaaaaagctgtaatcaccccacaaatcgggggctgctccagcttgtcttcgtcccaggaagacatggtgtttcgtcctttccacaagatatataaa

SEQ ID NO: 5299 - DNA, 127 bp, Artificial
  Synthetic
aacgacggccagtgaattcgagctcggtaccaaaaaagctgtgattaccctgcaaatcgagggctgctccagcttgtcttcgtcccaggaagacatggtgtttcgtcctttccacaagatatataaa

SEQ ID NO: 5300 - DNA, 111 bp, Artificial
  Synthetic
gagacccaagctggctagcgtttaaacttaagcttgccaccatgggatcccttcaactgcctccacttgaaagactgacactgggatccgaattcgagaacatcaagaaaa

SEQ ID NO: 5301 - DNA, 31 bp, Artificial
  Synthetic
caggtaggcgctgaagtagtttgccaggttc

SEQ ID NO: 5302 - DNA, 31 bp, Artificial
  Synthetic
gaacctggcaaactacttcagcgcctacctg

SEQ ID NO: 5303 - DNA, 31 bp, Artificial
  Synthetic
gttgtaggccagcagggcgttcgccactctc

SEQ ID NO: 5304 - DNA, 31 bp, Artificial
  Synthetic
gagagtggcgaacgccctgctggcctacaac

SEQ ID NO: 5305 - DNA, 43 bp, Artificial
  Synthetic
actaccgcctgaccctcccacgatcagggaccattttttctcg

SEQ ID NO: 5306 - DNA, 111 bp, Artificial
  Synthetic
gagacccaagctggctagcgtttaaacttaagcttgccaccatgggatcccttcaactgcctccacttgaaagactgacactgggatccgcccaggtgtccaagcagacca

SEQ ID NO: 5307 - DNA, 31 bp, Artificial
  Synthetic
tctgtaggcgctgaagtagtttgccagagcc

SEQ ID NO: 5308 - DNA, 31 bp, Artificial
  Synthetic
ggctctggcaaactacttcagcgcctacaga

SEQ ID NO: 5309 - DNA, 31 bp, Artificial
  Synthetic
gtggtgggcaaagaaggctctcgccactttg

SEQ ID NO: 5310 - DNA, 31 bp, Artificial
  Synthetic
caaagtggcgagagccttctttgcccaccac

SEQ ID NO: 5311 - DNA, 43 bp, Artificial
  Synthetic
actaccgcctgaccctcccttcacggggaacttccattctttc

SEQ ID NO: 5312 - DNA, 114 bp, Artificial
  Synthetic
gagacccaagctggctagcgtttaaacttaagcttgccaccatgggatcccttcaactgcctccacttgaaagactgacactgggatccatgggcatcgattacagcctgacca

SEQ ID NO: 5313 - DNA, 30 bp, Artificial
  Synthetic
ggagggtcaggcggtagtcagctgcattta

SEQ ID NO: 5314 - DNA, 25 bp, Artificial
  Synthetic
gggtttaaacgggccctctagactc

SEQ ID NO: 5315 - DNA, 25 bp, Artificial
  Synthetic
ccagatcgggggttccggcgggtcc

SEQ ID NO: 5316 - DNA, 59 bp, Artificial
  Synthetic
tatttaataataaaaatcataaatcataagaaattcgccacgtgagtctaggatcctca

SEQ ID NO: 5317 - DNA, 45 bp, Artificial
  Synthetic
actcactatagggaatattaagcttttcaattcatcatttttttt

SEQ ID NO: 5318 - DNA, 20 bp, Artificial
  Synthetic
ttagttttgctggccgcatc

SEQ ID NO: 5319 - DNA, 21 bp, Artificial
  Synthetic
aatgtctgcctattctgctat

SEQ ID NO: 5320 - DNA, 21 bp, Artificial
  Synthetic
atagcagaataggcagacatt

SEQ ID NO: 5321 - DNA, 40 bp, Artificial
  Synthetic
gggcgcgtggggatgatccattcttgaataatacataact

SEQ ID NO: 5322 - DNA, 41 bp, Artificial
  Synthetic
aaacaacaaaaggatactagtcgctatcctcggttctgcat

SEQ ID NO: 5323 - DNA, 31 bp, Artificial
  Synthetic
ttagtaaatggtgctcatttttcggcgtaca

SEQ ID NO: 5324 - DNA, 31 bp, Artificial
  Synthetic
tgtacgccgaaaaatgagcaccatttactaa

SEQ ID NO: 5325 - DNA, 25 bp, Artificial
  Synthetic
aactgtgggaatactcaggtatcgt

SEQ ID NO: 5326 - DNA, 30 bp, Artificial
  Synthetic
ttaagcaaggattttcttaacttcttcggc

SEQ ID NO: 5327 - DNA, 25 bp, Artificial
  Synthetic
ccagatcgggggttccggcgggtcc

SEQ ID NO: 5328 - DNA, 23 bp, Artificial
  Synthetic
gaacaaaagctggagctccaccg

SEQ ID NO: 5329 - DNA, 31 bp, Artificial
  Synthetic
gacgccctgcctaacccatctttgccggtcg

SEQ ID NO: 5330 - DNA, 31 bp, Artificial
  Synthetic
cgaccggcaaagatgggttaggcagggcgtc

SEQ ID NO: 5331 - DNA, 34 bp, Artificial
  Synthetic
cgtcaatggtgcccatttttcggcgtacaaagga

SEQ ID NO: 5332 - DNA, 36 bp, Artificial
  Synthetic
caggcgtgagacagcgtcatctaaaacctgcggtaa

SEQ ID NO: 5333 - DNA, 36 bp, Artificial
  Synthetic
caggaccaggcgtgagaccgtgtcagctaaaacctg

SEQ ID NO: 5334 - DNA, 36 bp, Artificial
  Synthetic
caggtcaccaaacttaccggggaccaggcgtgagac

SEQ ID NO: 5335 - DNA, 36 bp, Artificial
  Synthetic
gaagttgtcggtcaggtcgtcaaacttacccaggac

SEQ ID NO: 5336 - DNA, 36 bp, Artificial
  Synthetic
aggggaggagaagttgtctgccaggtcaccaaactt

SEQ ID NO: 5337 - DNA, 36 bp, Artificial
  Synthetic
aggggaggagaagttgtcggacaggtcaccaaactt

SEQ ID NO: 5338 - DNA, 36 bp, Artificial
  Synthetic
agcgtgaggggaggagaatatgtcggtcaggtcacc

SEQ ID NO: 5339 - DNA, 36 bp, Artificial
  Synthetic
gcgagcgtgaggggaggaggagttgtcggtcaggtc

SEQ ID NO: 5340 - DNA, 36 bp, Artificial
  Synthetic
tccagccagcacttttctgccagcgtgaggggagga

SEQ ID NO: 5341 - DNA, 36 bp, Artificial
  Synthetic
gacgactccagccagcactcttctgcgagcgtgagg

SEQ ID NO: 5342 - DNA, 36 bp, Artificial
  Synthetic
tgtcatgacgactccagctaccacttttctgcgagc

SEQ ID NO: 5343 - DNA, 36 bp, Artificial
  Synthetic
tgtgcctgttgtcatgacgcctccagccagcacttt

SEQ ID NO: 5344 - DNA, 36 bp, Artificial
  Synthetic
atctttaacatctgtgccagatgtcatgacgactcc

SEQ ID NO: 5345 - DNA, 36 bp, Artificial
  Synthetic
acttatcaccttggcatctctaacatctgtgcctgt

SEQ ID NO: 5346 - DNA, 36 bp, Artificial
  Synthetic
tgttcctgtagaaacactgagcaccttggcatcttt

SEQ ID NO: 5347 - DNA, 36 bp, Artificial
  Synthetic
acattttgttcctgtagatgcacttatcaccttggc

SEQ ID NO: 5348 - DNA, 36 bp, Artificial
  Synthetic
acattttgttcctgtagactcacttatcaccttggc

SEQ ID NO: 5349 - DNA, 36 bp, Artificial
  Synthetic
accattaatacattttgtccgtgtagaaacacttat

SEQ ID NO: 5350 - DNA, 36 bp, Artificial
  Synthetic
ttcaccattaatacatttagctcctgtagaaacact

SEQ ID NO: 5351 - DNA, 36 bp, Artificial
  Synthetic
ttcaccattaatacatttacttcctgtagaaacact

SEQ ID NO: 5352 - DNA, 36 bp, Artificial
  Synthetic
catgtattcaccattaataaattttgttcctgtaga

SEQ ID NO: 5353 - DNA, 36 bp, Artificial
  Synthetic
acgatcactcatgtattcgtcattaatacattttgt

SEQ ID NO: 5354 - DNA, 36 bp, Artificial
  Synthetic
ttctgcatggcagtcattctgtgcaaggccacgatc

SEQ ID NO: 5355 - DNA, 36 bp, Artificial
  Synthetic
agatattatttctgcatgacggtcatttaatgcaag

SEQ ID NO: 5356 - DNA, 36 bp, Artificial
  Synthetic
gagcaaggatctccgagaggttatttctgcatggca

SEQ ID NO: 5357 - DNA, 36 bp, Artificial
  Synthetic
gagcaaggatctccgagaatttatttctgcatggca

SEQ ID NO: 5358 - DNA, 36 bp, Artificial
  Synthetic
aagaaatctgagcaaggagccccgagatattatttc

SEQ ID NO: 5359 - DNA, 36 bp, Artificial
  Synthetic
ataaagaaatctgagcaaatttctccgagatattat

SEQ ID NO: 5360 - DNA, 36 bp, Artificial
  Synthetic
aagctcaagttgtgtatacataaatctgagcaagga

SEQ ID NO: 5361 - DNA, 36 bp, Artificial
  Synthetic
ggatcttttttgatcatcccggttatttaagtaaag

SEQ ID NO: 5362 - DNA, 36 bp, Artificial
  Synthetic
gatggatcttttttgatcgcctttgttatttaagta

SEQ ID NO: 5363 - DNA, 36 bp, Artificial
  Synthetic
aaagatggatcttttttgcacatctttgttatttaa

SEQ ID NO: 5364 - DNA, 36 bp, Artificial
  Synthetic
aaagatggatcttttttgataatctttgttatttaa

SEQ ID NO: 5365 - DNA, 36 bp, Artificial
  Synthetic
ctctgatttctgaaagatgcctcttttttgatcatc

SEQ ID NO: 5366 - DNA, 36 bp, Artificial
  Synthetic
ccctcgctctgatttctgcaagatggatcttttttg

SEQ ID NO: 5367 - DNA, 36 bp, Artificial
  Synthetic
cccccctcgctctgatttcagaaagatggatctttt

SEQ ID NO: 5368 - DNA, 36 bp, Artificial
  Synthetic
cttcagcctaaaccccccacactctgatttctgaaa

SEQ ID NO: 5369 - DNA, 36 bp, Artificial
  Synthetic
ctccttcagcctaaaccctcttcgctctgatttctg

SEQ ID NO: 5370 - DNA, 36 bp, Artificial
  Synthetic
ctggacattctccttcaggataaacccccctcgctc

SEQ ID NO: 5371 - DNA, 36 bp, Artificial
  Synthetic
cagatgaaactggacattaaccttcagcctaaaccc

SEQ ID NO: 5372 - DNA, 36 bp, Artificial
  Synthetic
gtacagatgaaactggaccttctccttcagcctaaa

SEQ ID NO: 5373 - DNA, 36 bp, Artificial
  Synthetic
gggagaggtgctgatgtatggatgaaactggacatt

SEQ ID NO: 5374 - DNA, 36 bp, Artificial
  Synthetic
acagggagaggtgctgatgttcagatgaaactggac

SEQ ID NO: 5375 - DNA, 36 bp, Artificial
  Synthetic
tctggcatctccacagggaggggtgctgatgtacag

SEQ ID NO: 5376 - DNA, 36 bp, Artificial
  Synthetic
gaagattctggcatctcctctgggagaggtgctgat

SEQ ID NO: 5377 - DNA, 36 bp, Artificial
  Synthetic
atgtggtgagaagattcttgtatctccacagggaga

SEQ ID NO: 5378 - DNA, 36 bp, Artificial
  Synthetic
gattggctcatgtggtgagaggattctggcatctcc

SEQ ID NO: 5379 - DNA, 36 bp, Artificial
  Synthetic
ttcttccaggattggctcaagtggtgagaagattct

SEQ ID NO: 5380 - DNA, 36 bp, Artificial
  Synthetic
tctatctgctggttcttccatgattggctcatgtgg

SEQ ID NO: 5381 - DNA, 36 bp, Artificial
  Synthetic
tcttgctttacgatttggcagtctatctgctggttc

SEQ ID NO: 5382 - DNA, 36 bp, Artificial
  Synthetic
tcctcttgctttacgattgaggtgtctatctgctgg

SEQ ID NO: 5383 - DNA, 36 bp, Artificial
  Synthetic
tcctcttgctttacgattctggtgtctatctgctgg

SEQ ID NO: 5384 - DNA, 36 bp, Artificial
  Synthetic
ctgtcctcttgctttacggcgtgggtgtctatctgc

SEQ ID NO: 5385 - DNA, 36 bp, Artificial
  Synthetic
ctgtcctcttgctttacgctttgggtgtctatctgc

SEQ ID NO: 5386 - DNA, 36 bp, Artificial
  Synthetic
ccgtagctgtcctcttgcccgacgatttgggtgtct

SEQ ID NO: 5387 - DNA, 36 bp, Artificial
  Synthetic
ccgtagctgtcctcttgccgtacgatttgggtgtct

SEQ ID NO: 5388 - DNA, 36 bp, Artificial
  Synthetic
ggtccgtagctgtcctcttgttttacgatttgggtg

SEQ ID NO: 5389 - DNA, 36 bp, Artificial
  Synthetic
tttggtccgtagctgtcctattgctttacgatttgg

SEQ ID NO: 5390 - DNA, 36 bp, Artificial
  Synthetic
tttggtccgtagctgtccgcttgctttacgatttgg

SEQ ID NO: 5391 - DNA, 36 bp, Artificial
  Synthetic
ctctattttggtccgtagtcttcctcttgctttacg

SEQ ID NO: 5392 - DNA, 36 bp, Artificial
  Synthetic
ctctattttggtccgtagttctcctcttgctttacg

SEQ ID NO: 5393 - DNA, 36 bp, Artificial
  Synthetic
ctctattttggtccgtagttttcctcttgctttacg

SEQ ID NO: 5394 - DNA, 36 bp, Artificial
  Synthetic
agactctattttggtccgcatctgtcctcttgcttt

SEQ ID NO: 5395 - DNA, 36 bp, Artificial
  Synthetic
cgtcccctgaccagactccgttttggtccgtagctg

SEQ ID NO: 5396 - DNA, 36 bp, Artificial
  Synthetic
aatcgtcccctgaccagaccctattttggtccgtag

SEQ ID NO: 5397 - DNA, 36 bp, Artificial
  Synthetic
gcgcactggaatcgtcccgcgaccagactctatttt

SEQ ID NO: 5398 - DNA, 36 bp, Artificial
  Synthetic
cgcattggagcgcactggcatcgtcccctgaccaga

SEQ ID NO: 5399 - DNA, 36 bp, Artificial
  Synthetic
gatgctcgcattggagcggagtggaatcgtcccctg

SEQ ID NO: 5400 - DNA, 36 bp, Artificial
  Synthetic
ccacgtttggatgctcgctttggagcgcactggaat

SEQ ID NO: 5401 - DNA, 36 bp, Artificial
  Synthetic
cccgtcccacgtttggatgcccgcattggagcgcac

SEQ ID NO: 5402 - DNA, 36 bp, Artificial
  Synthetic
caccccgtcccacgtttgaaggctcgcattggagcg

SEQ ID NO: 5403 - DNA, 36 bp, Artificial
  Synthetic
cagcaccccgtcccacgtcaagatgctcgcattgga

SEQ ID NO: 5404 - DNA, 36 bp, Artificial
  Synthetic
cagcaccccgtcccacgtccggatgctcgcattgga

SEQ ID NO: 5405 - DNA, 36 bp, Artificial
  Synthetic
ccgctccccttgcagcacagcgtcccacgtttggat

SEQ ID NO: 5406 - DNA, 36 bp, Artificial
  Synthetic
gagcagccgctccccttgcaccaccccgtcccacgt

SEQ ID NO: 5407 - DNA, 36 bp, Artificial
  Synthetic
gcaggacatggtgagcaggatctccccttgcagcac

SEQ ID NO: 5408 - DNA, 36 bp, Artificial
  Synthetic
actgcaggacatggtgagctgccgctccccttgcag

SEQ ID NO: 5409 - DNA, 36 bp, Artificial
  Synthetic
tgcaatcttgtcactgcagttcatggtgagcagccg

SEQ ID NO: 5410 - DNA, 36 bp, Artificial
  Synthetic
ccagcgtgcaatcttgtcggggcaggacatggtgag

SEQ ID NO: 5411 - DNA, 36 bp, Artificial
  Synthetic
caccacgttccagcgtgcggtcttgtcactgcagga

SEQ ID NO: 5412 - DNA, 36 bp, Artificial
  Synthetic
caccacgttccagcgtgccaccttgtcactgcagga

SEQ ID NO: 5413 - DNA, 36 bp, Artificial
  Synthetic
gcccaccacgttccagcgaggaatcttgtcactgca

SEQ ID NO: 5414 - DNA, 36 bp, Artificial
  Synthetic
gatgcccaccacgttccagcttgcaatcttgtcact

SEQ ID NO: 5415 - DNA, 36 bp, Artificial
  Synthetic
tccctggatgcccaccactatccagcgtgcaatctt

SEQ ID NO: 5416 - DNA, 36 bp, Artificial
  Synthetic
tccctggatgcccaccaccttccagcgtgcaatctt

SEQ ID NO: 5417 - DNA, 36 bp, Artificial
  Synthetic
cagtgatccctggatgccctccacgttccagcgtgc

SEQ ID NO: 5418 - DNA, 36 bp, Artificial
  Synthetic
gagcagtgatccctggatactcaccacgttccagcg

SEQ ID NO: 5419 - DNA, 36 bp, Artificial
  Synthetic
gggctccacgaaaatgctaaacagtgatccctggat

SEQ ID NO: 5420 - DNA, 36 bp, Artificial
  Synthetic
cgagaagtaaatgggctcgatgaaaatgctgagcag

SEQ ID NO: 5421 - DNA, 36 bp, Artificial
  Synthetic
gatgatgctcgagaagtagttgggctccacgaaaat

SEQ ID NO: 5422 - DNA, 36 bp, Artificial
  Synthetic
caggatgatgctcgagaagtgaatgggctccacgaa

SEQ ID NO: 5423 - DNA, 36 bp, Artificial
  Synthetic
gctgcccaggatgatgcttctgaagtaaatgggctc

SEQ ID NO: 5424 - DNA, 36 bp, Artificial
  Synthetic
gtaaaggctgcccaggatcacgctcgagaagtaaat

SEQ ID NO: 5425 - DNA, 36 bp, Artificial
  Synthetic
gtggtaaaggctgcccagcatgatgctcgagaagta

SEQ ID NO: 5426 - DNA, 36 bp, Artificial
  Synthetic
gtggtccccgtggtaaaggttgcccaggatgatgct

SEQ ID NO: 5427 - DNA, 36 bp, Artificial
  Synthetic
ggccctggaaaggtggtcgacgtggtaaaggctgcc

SEQ ID NO: 5428 - DNA, 36 bp, Artificial
  Synthetic
ttaccgcaggttttagatgacgctgtctcacgcctg

SEQ ID NO: 5429 - DNA, 36 bp, Artificial
  Synthetic
caggttttagctgacacggtctcacgcctggtcctg

SEQ ID NO: 5430 - DNA, 36 bp, Artificial
  Synthetic
gtctcacgcctggtccccggtaagtttggtgacctg

SEQ ID NO: 5431 - DNA, 36 bp, Artificial
  Synthetic
gtcctgggtaagtttgacgacctgaccgacaacttc

SEQ ID NO: 5432 - DNA, 36 bp, Artificial
  Synthetic
aagtttggtgacctggcagacaacttctcctcccct

SEQ ID NO: 5433 - DNA, 36 bp, Artificial
  Synthetic
aagtttggtgacctgtccgacaacttctcctcccct

SEQ ID NO: 5434 - DNA, 36 bp, Artificial
  Synthetic
ggtgacctgaccgacatattctcctcccctcacgct

SEQ ID NO: 5435 - DNA, 36 bp, Artificial
  Synthetic
gacctgaccgacaactcctcctcccctcacgctcgc

SEQ ID NO: 5436 - DNA, 36 bp, Artificial
  Synthetic
tcctcccctcacgctggcagaaaagtgctggctgga

SEQ ID NO: 5437 - DNA, 36 bp, Artificial
  Synthetic
cctcacgctcgcagaagagtgctggctggagtcgtc

SEQ ID NO: 5438 - DNA, 36 bp, Artificial
  Synthetic
gctcgcagaaaagtggtagctggagtcgtcatgaca

SEQ ID NO: 5439 - DNA, 36 bp, Artificial
  Synthetic
aaagtgctggctggaggcgtcatgacaacaggcaca

SEQ ID NO: 5440 - DNA, 36 bp, Artificial
  Synthetic
ggagtcgtcatgacatctggcacagatgttaaagat

SEQ ID NO: 5441 - DNA, 36 bp, Artificial
  Synthetic
acaggcacagatgttagagatgccaaggtgataagt

SEQ ID NO: 5442 - DNA, 36 bp, Artificial
  Synthetic
aaagatgccaaggtgctcagtgtttctacaggaaca

SEQ ID NO: 5443 - DNA, 36 bp, Artificial
  Synthetic
gccaaggtgataagtgcatctacaggaacaaaatgt

SEQ ID NO: 5444 - DNA, 36 bp, Artificial
  Synthetic
gccaaggtgataagtgagtctacaggaacaaaatgt

SEQ ID NO: 5445 - DNA, 36 bp, Artificial
  Synthetic
ataagtgtttctacacggacaaaatgtattaatggt

SEQ ID NO: 5446 - DNA, 36 bp, Artificial
  Synthetic
agtgtttctacaggagctaaatgtattaatggtgaa

SEQ ID NO: 5447 - DNA, 36 bp, Artificial
  Synthetic
agtgtttctacaggaagtaaatgtattaatggtgaa

SEQ ID NO: 5448 - DNA, 36 bp, Artificial
  Synthetic
tctacaggaacaaaatttattaatggtgaatacatg

SEQ ID NO: 5449 - DNA, 36 bp, Artificial
  Synthetic
acaaaatgtattaatgacgaatacatgagtgatcgt

SEQ ID NO: 5450 - DNA, 36 bp, Artificial
  Synthetic
gatcgtggccttgcacagaatgactgccatgcagaa

SEQ ID NO: 5451 - DNA, 36 bp, Artificial
  Synthetic
cttgcattaaatgaccgtcatgcagaaataatatct

SEQ ID NO: 5452 - DNA, 36 bp, Artificial
  Synthetic
tgccatgcagaaataacctctcggagatccttgctc

SEQ ID NO: 5453 - DNA, 36 bp, Artificial
  Synthetic
tgccatgcagaaataaattctcggagatccttgctc

SEQ ID NO: 5454 - DNA, 36 bp, Artificial
  Synthetic
gaaataatatctcggggctccttgctcagatttctt

SEQ ID NO: 5455 - DNA, 36 bp, Artificial
  Synthetic
ataatatctcggagaaatttgctcagatttctttat

SEQ ID NO: 5456 - DNA, 36 bp, Artificial
  Synthetic
tccttgctcagatttatgtatacacaacttgagctt

SEQ ID NO: 5457 - DNA, 36 bp, Artificial
  Synthetic
ctttacttaaataaccgggatgatcaaaaaagatcc

SEQ ID NO: 5458 - DNA, 36 bp, Artificial
  Synthetic
tacttaaataacaaaggcgatcaaaaaagatccatc

SEQ ID NO: 5459 - DNA, 36 bp, Artificial
  Synthetic
ttaaataacaaagatgtgcaaaaaagatccatcttt

SEQ ID NO: 5460 - DNA, 36 bp, Artificial
  Synthetic
ttaaataacaaagattatcaaaaaagatccatcttt

SEQ ID NO: 5461 - DNA, 36 bp, Artificial
  Synthetic
gatgatcaaaaaagaggcatctttcagaaatcagag

SEQ ID NO: 5462 - DNA, 36 bp, Artificial
  Synthetic
caaaaaagatccatcttgcagaaatcagagcgaggg

SEQ ID NO: 5463 - DNA, 36 bp, Artificial
  Synthetic
aaaagatccatctttctgaaatcagagcgagggggg

SEQ ID NO: 5464 - DNA, 36 bp, Artificial
  Synthetic
tttcagaaatcagagtgtggggggtttaggctgaag

SEQ ID NO: 5465 - DNA, 36 bp, Artificial
  Synthetic
cagaaatcagagcgaagagggtttaggctgaaggag

SEQ ID NO: 5466 - DNA, 36 bp, Artificial
  Synthetic
gagcgaggggggtttatcctgaaggagaatgtccag

SEQ ID NO: 5467 - DNA, 36 bp, Artificial
  Synthetic
gggtttaggctgaaggttaatgtccagtttcatctg

SEQ ID NO: 5468 - DNA, 36 bp, Artificial
  Synthetic
tttaggctgaaggagaaggtccagtttcatctgtac

SEQ ID NO: 5469 - DNA, 36 bp, Artificial
  Synthetic
aatgtccagtttcatccatacatcagcacctctccc

SEQ ID NO: 5470 - DNA, 36 bp, Artificial
  Synthetic
gtccagtttcatctgaacatcagcacctctccctgt

SEQ ID NO: 5471 - DNA, 36 bp, Artificial
  Synthetic
ctgtacatcagcacccctccctgtggagatgccaga

SEQ ID NO: 5472 - DNA, 36 bp, Artificial
  Synthetic
atcagcacctctcccagaggagatgccagaatcttc

SEQ ID NO: 5473 - DNA, 36 bp, Artificial
  Synthetic
tctccctgtggagatacaagaatcttctcaccacat

SEQ ID NO: 5474 - DNA, 36 bp, Artificial
  Synthetic
ggagatgccagaatcctctcaccacatgagccaatc

SEQ ID NO: 5475 - DNA, 36 bp, Artificial
  Synthetic
agaatcttctcaccacttgagccaatcctggaagaa

SEQ ID NO: 5476 - DNA, 36 bp, Artificial
  Synthetic
ccacatgagccaatcatggaagaaccagcagataga

SEQ ID NO: 5477 - DNA, 36 bp, Artificial
  Synthetic
gaaccagcagatagactgccaaatcgtaaagcaaga

SEQ ID NO: 5478 - DNA, 36 bp, Artificial
  Synthetic
ccagcagatagacacctcaatcgtaaagcaagagga

SEQ ID NO: 5479 - DNA, 36 bp, Artificial
  Synthetic
ccagcagatagacaccagaatcgtaaagcaagagga

SEQ ID NO: 5480 - DNA, 36 bp, Artificial
  Synthetic
gcagatagacacccacgccgtaaagcaagaggacag

SEQ ID NO: 5481 - DNA, 36 bp, Artificial
  Synthetic
gcagatagacacccaaagcgtaaagcaagaggacag

SEQ ID NO: 5482 - DNA, 36 bp, Artificial
  Synthetic
agacacccaaatcgtcgggcaagaggacagctacgg

SEQ ID NO: 5483 - DNA, 36 bp, Artificial
  Synthetic
agacacccaaatcgtacggcaagaggacagctacgg

SEQ ID NO: 5484 - DNA, 36 bp, Artificial
  Synthetic
cacccaaatcgtaaaacaagaggacagctacggacc

SEQ ID NO: 5485 - DNA, 36 bp, Artificial
  Synthetic
ccaaatcgtaaagcaataggacagctacggaccaaa

SEQ ID NO: 5486 - DNA, 36 bp, Artificial
  Synthetic
ccaaatcgtaaagcaagcggacagctacggaccaaa

SEQ ID NO: 5487 - DNA, 36 bp, Artificial
  Synthetic
cgtaaagcaagaggaagactacggaccaaaatagag

SEQ ID NO: 5488 - DNA, 36 bp, Artificial
  Synthetic
cgtaaagcaagaggagaactacggaccaaaatagag

SEQ ID NO: 5489 - DNA, 36 bp, Artificial
  Synthetic
cgtaaagcaagaggaaaactacggaccaaaatagag

SEQ ID NO: 5490 - DNA, 36 bp, Artificial
  Synthetic
aaagcaagaggacagatgcggaccaaaatagagtct

SEQ ID NO: 5491 - DNA, 36 bp, Artificial
  Synthetic
cagctacggaccaaaacggagtctggtcaggggacg

SEQ ID NO: 5492 - DNA, 36 bp, Artificial
  Synthetic
ctacggaccaaaatagggtctggtcaggggacgatt

SEQ ID NO: 5493 - DNA, 36 bp, Artificial
  Synthetic
aaaatagagtctggtcgcgggacgattccagtgcgc

SEQ ID NO: 5494 - DNA, 36 bp, Artificial
  Synthetic
tctggtcaggggacgatgccagtgcgctccaatgcg

SEQ ID NO: 5495 - DNA, 36 bp, Artificial
  Synthetic
caggggacgattccactccgctccaatgcgagcatc

SEQ ID NO: 5496 - DNA, 36 bp, Artificial
  Synthetic
attccagtgcgctccaaagcgagcatccaaacgtgg

SEQ ID NO: 5497 - DNA, 36 bp, Artificial
  Synthetic
gtgcgctccaatgcgggcatccaaacgtgggacggg

SEQ ID NO: 5498 - DNA, 36 bp, Artificial
  Synthetic
cgctccaatgcgagccttcaaacgtgggacggggtg

SEQ ID NO: 5499 - DNA, 36 bp, Artificial
  Synthetic
tccaatgcgagcatcttgacgtgggacggggtgctg

SEQ ID NO: 5500 - DNA, 36 bp, Artificial
  Synthetic
tccaatgcgagcatccggacgtgggacggggtgctg

SEQ ID NO: 5501 - DNA, 36 bp, Artificial
  Synthetic
atccaaacgtgggacgctgtgctgcaaggggagcgg

SEQ ID NO: 5502 - DNA, 36 bp, Artificial
  Synthetic
acgtgggacggggtggtgcaaggggagcggctgctc

SEQ ID NO: 5503 - DNA, 36 bp, Artificial
  Synthetic
gtgctgcaaggggagatcctgctcaccatgtcctgc

SEQ ID NO: 5504 - DNA, 36 bp, Artificial
  Synthetic
ctgcaaggggagcggcagctcaccatgtcctgcagt

SEQ ID NO: 5505 - DNA, 36 bp, Artificial
  Synthetic
cggctgctcaccatgaactgcagtgacaagattgca

SEQ ID NO: 5506 - DNA, 36 bp, Artificial
  Synthetic
ctcaccatgtcctgccccgacaagattgcacgctgg

SEQ ID NO: 5507 - DNA, 36 bp, Artificial
  Synthetic
tcctgcagtgacaagaccgcacgctggaacgtggtg

SEQ ID NO: 5508 - DNA, 36 bp, Artificial
  Synthetic
tcctgcagtgacaaggtggcacgctggaacgtggtg

SEQ ID NO: 5509 - DNA, 36 bp, Artificial
  Synthetic
tgcagtgacaagattcctcgctggaacgtggtgggc

SEQ ID NO: 5510 - DNA, 36 bp, Artificial
  Synthetic
agtgacaagattgcaagctggaacgtggtgggcatc

SEQ ID NO: 5511 - DNA, 36 bp, Artificial
  Synthetic
aagattgcacgctggatagtggtgggcatccaggga

SEQ ID NO: 5512 - DNA, 36 bp, Artificial
  Synthetic
aagattgcacgctggaaggtggtgggcatccaggga

SEQ ID NO: 5513 - DNA, 36 bp, Artificial
  Synthetic
gcacgctggaacgtggagggcatccagggatcactg

SEQ ID NO: 5514 - DNA, 36 bp, Artificial
  Synthetic
cgctggaacgtggtgagtatccagggatcactgctc

SEQ ID NO: 5515 - DNA, 36 bp, Artificial
  Synthetic
atccagggatcactgtttagcattttcgtggagccc

SEQ ID NO: 5516 - DNA, 36 bp, Artificial
  Synthetic
ctgctcagcattttcatcgagcccatttacttctcg

SEQ ID NO: 5517 - DNA, 36 bp, Artificial
  Synthetic
attttcgtggagcccaactacttctcgagcatcatc

SEQ ID NO: 5518 - DNA, 36 bp, Artificial
  Synthetic
ttcgtggagcccattcacttctcgagcatcatcctg

SEQ ID NO: 5519 - DNA, 36 bp, Artificial
  Synthetic
gagcccatttacttcagaagcatcatcctgggcagc

SEQ ID NO: 5520 - DNA, 36 bp, Artificial
  Synthetic
atttacttctcgagcgtgatcctgggcagcctttac

SEQ ID NO: 5521 - DNA, 36 bp, Artificial
  Synthetic
tacttctcgagcatcatgctgggcagcctttaccac

SEQ ID NO: 5522 - DNA, 36 bp, Artificial
  Synthetic
agcatcatcctgggcaacctttaccacggggaccac

SEQ ID NO: 5523 - DNA, 36 bp, Artificial
  Synthetic
ggcagcctttaccacgtcgaccacctttccagggcc

SEQ ID NO: 5524 - DNA, 36 bp, Artificial
  Synthetic
catggccctggaaaggtgttccccgtggtaaaggct

SEQ ID NO: 5525 - DNA, 36 bp, Artificial
  Synthetic
gatccgctggtacatggcgtgggaaaggtggtcccc

SEQ ID NO: 5526 - DNA, 36 bp, Artificial
  Synthetic
gatccgctggtacatggcgagggaaaggtggtcccc

SEQ ID NO: 5527 - DNA, 36 bp, Artificial
  Synthetic
gatccgctggtacatggccccggaaaggtggtcccc

SEQ ID NO: 5528 - DNA, 36 bp, Artificial
  Synthetic
tatgttggagatccgctggtgcatggccctggaaag

SEQ ID NO: 5529 - DNA, 36 bp, Artificial
  Synthetic
ctctatgttggagatccgatggtacatggccctgga

SEQ ID NO: 5530 - DNA, 36 bp, Artificial
  Synthetic
gtcctctatgttggagatagactggtacatggccct

SEQ ID NO: 5531 - DNA, 36 bp, Artificial
  Synthetic
aggtggcaggtcctctatgtaggagatccgctggta

SEQ ID NO: 5532 - DNA, 36 bp, Artificial
  Synthetic
ttctgcattgctgatgccgaagagcaaaggcttgtt

SEQ ID NO: 5533 - DNA, 36 bp, Artificial
  Synthetic
ctgccgtgcttctgcatttgggatgccactgagcaa

SEQ ID NO: 5534 - DNA, 36 bp, Artificial
  Synthetic
cgtccagttgacactgaagtagggggccttccctgg

SEQ ID NO: 5535 - DNA, 36 bp, Artificial
  Synthetic
gtcgcctaccgtccagttgccactgaagttgggggc

SEQ ID NO: 5536 - DNA, 36 bp, Artificial
  Synthetic
ggcgttgatgacctcaattacggagtcgcctaccgt

SEQ ID NO: 5537 - DNA, 36 bp, Artificial
  Synthetic
cgtggcgttgatgacctcaaaagcggagtcgcctac

SEQ ID NO: 5538 - DNA, 36 bp, Artificial
  Synthetic
atccttcccagtcgtggcgatgatgacctcaatagc

SEQ ID NO: 5539 - DNA, 36 bp, Artificial
  Synthetic
gcccagctcatccttcccgctcgtggcgttgatgac

SEQ ID NO: 5540 - DNA, 36 bp, Artificial
  Synthetic
cgcgcggcccagctcatcattcccagtcgtggcgtt

SEQ ID NO: 5541 - DNA, 36 bp, Artificial
  Synthetic
cgcgcggcccagctcatctatcccagtcgtggcgtt

SEQ ID NO: 5542 - DNA, 36 bp, Artificial
  Synthetic
cgcgcggcccagctcatcgcgcccagtcgtggcgtt

SEQ ID NO: 5543 - DNA, 36 bp, Artificial
  Synthetic
gcgggacgcgcggcccaggccatccttcccagtcgt

SEQ ID NO: 5544 - DNA, 36 bp, Artificial
  Synthetic
cttacacaggcgggacgcagagcccagctcatcctt

SEQ ID NO: 5545 - DNA, 36 bp, Artificial
  Synthetic
gcgacagtacaacgcgtgttcacacaggcgggacgc

SEQ ID NO: 5546 - DNA, 36 bp, Artificial
  Synthetic
gcgtagtaagtgggagggctccttgccgtgcacacg

SEQ ID NO: 5547 - DNA, 36 bp, Artificial
  Synthetic
cttggagcgtagtaagtgggggggaaccttgccgtg

SEQ ID NO: 5548 - DNA, 36 bp, Artificial
  Synthetic
gtacacgttgggcttggtggtcttggagcgtagtaa

SEQ ID NO: 5549 - DNA, 36 bp, Artificial
  Synthetic
atggtacacgttgggcttaataatcttggagcgtag

SEQ ID NO: 5550 - DNA, 36 bp, Artificial
  Synthetic
atggtacacgttgggcttctcaatcttggagcgtag

SEQ ID NO: 5551 - DNA, 36 bp, Artificial
  Synthetic
tgccgccagcttggactccctgtacacgttgggctt

SEQ ID NO: 5552 - DNA, 36 bp, Artificial
  Synthetic
ggcggcctggtactccttggtcgccagcttggactc

SEQ ID NO: 5553 - DNA, 36 bp, Artificial
  Synthetic
cgccttggcggcctggtacttctttgccgccagctt

SEQ ID NO: 5554 - DNA, 36 bp, Artificial
  Synthetic
gaacagacgcgccttggccacctggtactcctttgc

SEQ ID NO: 5555 - DNA, 36 bp, Artificial
  Synthetic
gatgaaggctgtgaacagtcccgccttggcggcctg

SEQ ID NO: 5556 - DNA, 36 bp, Artificial
  Synthetic
gatgaaggctgtgaacagcatcgccttggcggcctg

SEQ ID NO: 5557 - DNA, 36 bp, Artificial
  Synthetic
gagtgagaactggtcctgcccggtgggcttctccac

SEQ ID NO: 5558 - DNA, 33 bp, Artificial
  Synthetic
ttacgtgagtgagaacaggtcctgctcggtggg

SEQ ID NO: 5559 - DNA, 36 bp, Artificial
  Synthetic
agcctttaccacggggaacacctttccagggccatg

SEQ ID NO: 5560 - DNA, 36 bp, Artificial
  Synthetic
ggggaccacctttcccacgccatgtaccagcggatc

SEQ ID NO: 5561 - DNA, 36 bp, Artificial
  Synthetic
ggggaccacctttccctcgccatgtaccagcggatc

SEQ ID NO: 5562 - DNA, 36 bp, Artificial
  Synthetic
ggggaccacctttccggggccatgtaccagcggatc

SEQ ID NO: 5563 - DNA, 36 bp, Artificial
  Synthetic
ctttccagggccatgcaccagcggatctccaacata

SEQ ID NO: 5564 - DNA, 36 bp, Artificial
  Synthetic
tccagggccatgtaccatcggatctccaacatagag

SEQ ID NO: 5565 - DNA, 36 bp, Artificial
  Synthetic
agggccatgtaccagtctatctccaacatagaggac

SEQ ID NO: 5566 - DNA, 36 bp, Artificial
  Synthetic
taccagcggatctcctacatagaggacctgccacct

SEQ ID NO: 5567 - DNA, 36 bp, Artificial
  Synthetic
aacaagcctttgctcttcggcatcagcaatgcagaa

SEQ ID NO: 5568 - DNA, 36 bp, Artificial
  Synthetic
ttgctcagtggcatcccaaatgcagaagcacggcag

SEQ ID NO: 5569 - DNA, 36 bp, Artificial
  Synthetic
ccagggaaggccccctacttcagtgtcaactggacg

SEQ ID NO: 5570 - DNA, 36 bp, Artificial
  Synthetic
gcccccaacttcagtggcaactggacggtaggcgac

SEQ ID NO: 5571 - DNA, 36 bp, Artificial
  Synthetic
acggtaggcgactccgtaattgaggtcatcaacgcc

SEQ ID NO: 5572 - DNA, 36 bp, Artificial
  Synthetic
gtaggcgactccgcttttgaggtcatcaacgccacg

SEQ ID NO: 5573 - DNA, 36 bp, Artificial
  Synthetic
gctattgaggtcatcatcgccacgactgggaaggat

SEQ ID NO: 5574 - DNA, 36 bp, Artificial
  Synthetic
gtcatcaacgccacgagcgggaaggatgagctgggc

SEQ ID NO: 5575 - DNA, 36 bp, Artificial
  Synthetic
aacgccacgactgggaatgatgagctgggccgcgcg

SEQ ID NO: 5576 - DNA, 36 bp, Artificial
  Synthetic
aacgccacgactgggatagatgagctgggccgcgcg

SEQ ID NO: 5577 - DNA, 36 bp, Artificial
  Synthetic
aacgccacgactgggcgcgatgagctgggccgcgcg

SEQ ID NO: 5578 - DNA, 36 bp, Artificial
  Synthetic
acgactgggaaggatggcctgggccgcgcgtcccgc

SEQ ID NO: 5579 - DNA, 36 bp, Artificial
  Synthetic
aaggatgagctgggctctgcgtcccgcctgtgtaag

SEQ ID NO: 5580 - DNA, 36 bp, Artificial
  Synthetic
gcgtcccgcctgtgtgaacacgcgttgtactgtcgc

SEQ ID NO: 5581 - DNA, 36 bp, Artificial
  Synthetic
cgtgtgcacggcaaggagccctcccacttactacgc

SEQ ID NO: 5582 - DNA, 36 bp, Artificial
  Synthetic
cacggcaaggttcccccccacttactacgctccaag

SEQ ID NO: 5583 - DNA, 36 bp, Artificial
  Synthetic
ttactacgctccaagaccaccaagcccaacgtgtac

SEQ ID NO: 5584 - DNA, 36 bp, Artificial
  Synthetic
ctacgctccaagattattaagcccaacgtgtaccat

SEQ ID NO: 5585 - DNA, 36 bp, Artificial
  Synthetic
ctacgctccaagattgagaagcccaacgtgtaccat

SEQ ID NO: 5586 - DNA, 36 bp, Artificial
  Synthetic
aagcccaacgtgtacagggagtccaagctggcggca

SEQ ID NO: 5587 - DNA, 36 bp, Artificial
  Synthetic
gagtccaagctggcgaccaaggagtaccaggccgcc

SEQ ID NO: 5588 - DNA, 36 bp, Artificial
  Synthetic
aagctggcggcaaagaagtaccaggccgccaaggcg

SEQ ID NO: 5589 - DNA, 36 bp, Artificial
  Synthetic
gcaaaggagtaccaggtggccaaggcgcgtctgttc

SEQ ID NO: 5590 - DNA, 36 bp, Artificial
  Synthetic
caggccgccaaggcgggactgttcacagccttcatc

SEQ ID NO: 5591 - DNA, 36 bp, Artificial
  Synthetic
caggccgccaaggcgatgctgttcacagccttcatc

SEQ ID NO: 5592 - DNA, 36 bp, Artificial
  Synthetic
gtggagaagcccaccgggcaggaccagttctcactc

SEQ ID NO: 5593 - DNA, 33 bp, Artificial
  Synthetic
cccaccgagcaggacctgttctcactcacgtaa

SEQ ID NO: 5594 - DNA, 33 bp, Artificial
  Synthetic
agcgtcagctaaaacgtgcggtaaatgcagctg

SEQ ID NO: 5595 - DNA, 33 bp, Artificial
  Synthetic
gacagcgtcagctaaggcctgcggtaaatgcag

SEQ ID NO: 5596 - DNA, 33 bp, Artificial
  Synthetic
caggaccaggcgtgaaatagcgtcagctaaaac

SEQ ID NO: 5597 - DNA, 33 bp, Artificial
  Synthetic
acccaggaccaggcgtgggacagcgtcagctaa

SEQ ID NO: 5598 - DNA, 33 bp, Artificial
  Synthetic
ggaggagaagttgtccatcaggtcaccaaactt

SEQ ID NO: 5599 - DNA, 33 bp, Artificial
  Synthetic
ttttctgcgagcgtgaagggaggagaagttgtc

SEQ ID NO: 5600 - DNA, 33 bp, Artificial
  Synthetic
tgtgcctgttgtcatcccgactccagccagcac

SEQ ID NO: 5601 - DNA, 33 bp, Artificial
  Synthetic
acttatcaccttggcctctttaacatctgtgcc

SEQ ID NO: 5602 - DNA, 33 bp, Artificial
  Synthetic
catgtattcaccattgaaacattttgttcctgt

SEQ ID NO: 5603 - DNA, 33 bp, Artificial
  Synthetic
atttaatgcaaggccccaatcactcatgtattc

SEQ ID NO: 5604 - DNA, 33 bp, Artificial
  Synthetic
ttctgcatggcagtcgcttaatgcaaggccacg

SEQ ID NO: 5605 - DNA, 33 bp, Artificial
  Synthetic
ggatctccgagatatgctttctgcatggcagtc

SEQ ID NO: 5606 - DNA, 33 bp, Artificial
  Synthetic
tgtataaagaaatctcatcaaggatctccgaga

SEQ ID NO: 5607 - DNA, 33 bp, Artificial
  Synthetic
taagtaaagctcaaggcgtgtataaagaaatct

SEQ ID NO: 5608 - DNA, 33 bp, Artificial
  Synthetic
atctttgttatttaagtgaagctcaagttgtgt

SEQ ID NO: 5609 - DNA, 33 bp, Artificial
  Synthetic
atctttgttatttaagcaaagctcaagttgtgt

SEQ ID NO: 5610 - DNA, 33 bp, Artificial
  Synthetic
ggatcttttttgatcatttttgttatttaagta

SEQ ID NO: 5611 - DNA, 33 bp, Artificial
  Synthetic
cagcctaaaccccccgtgctctgatttctgaaa

SEQ ID NO: 5612 - DNA, 33 bp, Artificial
  Synthetic
atgaaactggacattagccttcagcctaaaccc

SEQ ID NO: 5613 - DNA, 33 bp, Artificial
  Synthetic
gctgatgtacagatgaagctggacattctcctt

SEQ ID NO: 5614 - DNA, 33 bp, Artificial
  Synthetic
atctccacagggagagatgctgatgtacagatg

SEQ ID NO: 5615 - DNA, 33 bp, Artificial
  Synthetic
tggctcatgtggtgagatgattctggcatctcc

SEQ ID NO: 5616 - DNA, 33 bp, Artificial
  Synthetic
atttgggtgtctatcttctggttcttccaggat

SEQ ID NO: 5617 - DNA, 33 bp, Artificial
  Synthetic
cccctgaccagactccactttggtccgtagctg

SEQ ID NO: 5618 - DNA, 33 bp, Artificial
  Synthetic
cgtcccctgaccagagactattttggtccgtag

SEQ ID NO: 5619 - DNA, 33 bp, Artificial
  Synthetic
ccgctccccttgcaggatcccgtcccacgtttg

SEQ ID NO: 5620 - DNA, 33 bp, Artificial
  Synthetic
catggtgagcagccggaccccttgcagcacccc

SEQ ID NO: 5621 - DNA, 33 bp, Artificial
  Synthetic
tgcaatcttgtcactgaaggacatggtgagcag

SEQ ID NO: 5622 - DNA, 33 bp, Artificial
  Synthetic
gcgtgcaatcttgtcgtagcaggacatggtgag

SEQ ID NO: 5623 - DNA, 33 bp, Artificial
  Synthetic
cacgaaaatgctgaggattgatccctggatgcc

SEQ ID NO: 5624 - DNA, 33 bp, Artificial
  Synthetic
aaggctgcccaggatgttgctcgagaagtaaat

SEQ ID NO: 5625 - DNA, 33 bp, Artificial
  Synthetic
gtccccgtggtaaagagtgcccaggatgatgct

SEQ ID NO: 5626 - DNA, 33 bp, Artificial
  Synthetic
aaggtggtccccgtggttaaggctgcccaggat

SEQ ID NO: 5627 - DNA, 33 bp, Artificial
  Synthetic
cctggaaaggtggtctcggtggtaaaggctgcc

SEQ ID NO: 5628 - DNA, 33 bp, Artificial
  Synthetic
cctggaaaggtggtcctcgtggtaaaggctgcc

SEQ ID NO: 5629 - DNA, 33 bp, Artificial
  Synthetic
ctctatgttggagatgccctggtacatggccct

SEQ ID NO: 5630 - DNA, 33 bp, Artificial
  Synthetic
gtcctctatgttggaaaaccgctggtacatggc

SEQ ID NO: 5631 - DNA, 33 bp, Artificial
  Synthetic
tggcaggtcctctatgtcggagatccgctggta

SEQ ID NO: 5632 - DNA, 33 bp, Artificial
  Synthetic
tggctgccgtgcttccacattgctgatgccact

SEQ ID NO: 5633 - DNA, 33 bp, Artificial
  Synthetic
gaagttgggggccttccatggctgccgtgcttc

SEQ ID NO: 5634 - DNA, 33 bp, Artificial
  Synthetic
agcggagtcgcctactgcccagttgacactgaa

SEQ ID NO: 5635 - DNA, 33 bp, Artificial
  Synthetic
agtcgtggcgttgatagcctcaatagcggagtc

SEQ ID NO: 5636 - DNA, 33 bp, Artificial
  Synthetic
atccttcccagtcgtcccgttgatgacctcaat

SEQ ID NO: 5637 - DNA, 33 bp, Artificial
  Synthetic
cgcgcggcccaggccttccttcccagtcgtggc

SEQ ID NO: 5638 - DNA, 33 bp, Artificial
  Synthetic
cgcgtgcttacacagcttggacgcgcggcccag

SEQ ID NO: 5639 - DNA, 33 bp, Artificial
  Synthetic
cacacgcatccagcgccagtacaacgcgtgctt

SEQ ID NO: 5640 - DNA, 33 bp, Artificial
  Synthetic
cacgttgggcttggtaaccttggagcgtagtaa

SEQ ID NO: 5641 - DNA, 33 bp, Artificial
  Synthetic
ttacgtgagtgagaaatggtcctgctcggtggg

SEQ ID NO: 5642 - DNA, 33 bp, Artificial
  Synthetic
cagctgcatttaccgcacgttttagctgacgct

SEQ ID NO: 5643 - DNA, 33 bp, Artificial
  Synthetic
ctgcatttaccgcaggccttagctgacgctgtc

SEQ ID NO: 5644 - DNA, 33 bp, Artificial
  Synthetic
gttttagctgacgctatttcacgcctggtcctg

SEQ ID NO: 5645 - DNA, 33 bp, Artificial
  Synthetic
ttagctgacgctgtcccacgcctggtcctgggt

SEQ ID NO: 5646 - DNA, 33 bp, Artificial
  Synthetic
aagtttggtgacctgatggacaacttctcctcc

SEQ ID NO: 5647 - DNA, 33 bp, Artificial
  Synthetic
gacaacttctcctcccttcacgctcgcagaaaa

SEQ ID NO: 5648 - DNA, 33 bp, Artificial
  Synthetic
gtgctggctggagtcgggatgacaacaggcaca

SEQ ID NO: 5649 - DNA, 33 bp, Artificial
  Synthetic
ggcacagatgttaaagaggccaaggtgataagt

SEQ ID NO: 5650 - DNA, 33 bp, Artificial
  Synthetic
acaggaacaaaatgtttcaatggtgaatacatg

SEQ ID NO: 5651 - DNA, 33 bp, Artificial
  Synthetic
gaatacatgagtgattggggccttgcattaaat

SEQ ID NO: 5652 - DNA, 33 bp, Artificial
  Synthetic
cgtggccttgcattaagcgactgccatgcagaa

SEQ ID NO: 5653 - DNA, 33 bp, Artificial
  Synthetic
gactgccatgcagaaagcatatctcggagatcc

SEQ ID NO: 5654 - DNA, 33 bp, Artificial
  Synthetic
tctcggagatccttgatgagatttctttataca

SEQ ID NO: 5655 - DNA, 33 bp, Artificial
  Synthetic
agatttctttatacacgccttgagctttactta

SEQ ID NO: 5656 - DNA, 33 bp, Artificial
  Synthetic
acacaacttgagcttcacttaaataacaaagat

SEQ ID NO: 5657 - DNA, 33 bp, Artificial
  Synthetic
acacaacttgagctttgcttaaataacaaagat

SEQ ID NO: 5658 - DNA, 33 bp, Artificial
  Synthetic
tacttaaataacaaaaatgatcaaaaaagatcc

SEQ ID NO: 5659 - DNA, 33 bp, Artificial
  Synthetic
tttcagaaatcagagcacggggggtttaggctg

SEQ ID NO: 5660 - DNA, 33 bp, Artificial
  Synthetic
gggtttaggctgaaggctaatgtccagtttcat

SEQ ID NO: 5661 - DNA, 33 bp, Artificial
  Synthetic
aaggagaatgtccagcttcatctgtacatcagc

SEQ ID NO: 5662 - DNA, 33 bp, Artificial
  Synthetic
catctgtacatcagcatctctccctgtggagat

SEQ ID NO: 5663 - DNA, 33 bp, Artificial
  Synthetic
ggagatgccagaatcatctcaccacatgagcca

SEQ ID NO: 5664 - DNA, 33 bp, Artificial
  Synthetic
atcctggaagaaccagaagatagacacccaaat

SEQ ID NO: 5665 - DNA, 33 bp, Artificial
  Synthetic
cagctacggaccaaagtggagtctggtcagggg

SEQ ID NO: 5666 - DNA, 33 bp, Artificial
  Synthetic
ctacggaccaaaatagtctctggtcaggggacg

SEQ ID NO: 5667 - DNA, 33 bp, Artificial
  Synthetic
caaacgtgggacgggatcctgcaaggggagcgg

SEQ ID NO: 5668 - DNA, 33 bp, Artificial
  Synthetic
ggggtgctgcaaggggtccggctgctcaccatg

SEQ ID NO: 5669 - DNA, 33 bp, Artificial
  Synthetic
ctgctcaccatgtccttcagtgacaagattgca

SEQ ID NO: 5670 - DNA, 33 bp, Artificial
  Synthetic
ctcaccatgtcctgctacgacaagattgcacgc

SEQ ID NO: 5671 - DNA, 33 bp, Artificial
  Synthetic
ggcatccagggatcaatcctcagcattttcgtg

SEQ ID NO: 5672 - DNA, 33 bp, Artificial
  Synthetic
atttacttctcgagcaacatcctgggcagcctt

SEQ ID NO: 5673 - DNA, 33 bp, Artificial
  Synthetic
agcatcatcctgggcactctttaccacggggac

SEQ ID NO: 5674 - DNA, 33 bp, Artificial
  Synthetic
atcctgggcagccttaaccacggggaccacctt

SEQ ID NO: 5675 - DNA, 33 bp, Artificial
  Synthetic
ggcagcctttaccaccgagaccacctttccagg

SEQ ID NO: 5676 - DNA, 33 bp, Artificial
  Synthetic
ggcagcctttaccacgaggaccacctttccagg

SEQ ID NO: 5677 - DNA, 33 bp, Artificial
  Synthetic
agggccatgtaccagggcatctccaacatagag

SEQ ID NO: 5678 - DNA, 33 bp, Artificial
  Synthetic
gccatgtaccagcggttttccaacatagaggac

SEQ ID NO: 5679 - DNA, 33 bp, Artificial
  Synthetic
taccagcggatctccgacatagaggacctgcca

SEQ ID NO: 5680 - DNA, 33 bp, Artificial
  Synthetic
agtggcatcagcaatgtggaagcacggcagcca

SEQ ID NO: 5681 - DNA, 33 bp, Artificial
  Synthetic
gaagcacggcagccatggaaggcccccaacttc

SEQ ID NO: 5682 - DNA, 33 bp, Artificial
  Synthetic
ttcagtgtcaactgggcagtaggcgactccgct

SEQ ID NO: 5683 - DNA, 33 bp, Artificial
  Synthetic
gactccgctattgaggctatcaacgccacgact

SEQ ID NO: 5684 - DNA, 33 bp, Artificial
  Synthetic
attgaggtcatcaacgggacgactgggaaggat

SEQ ID NO: 5685 - DNA, 33 bp, Artificial
  Synthetic
gccacgactgggaaggaaggcctgggccgcgcg

SEQ ID NO: 5686 - DNA, 33 bp, Artificial
  Synthetic
ctgggccgcgcgtccaagctgtgtaagcacgcg

SEQ ID NO: 5687 - DNA, 33 bp, Artificial
  Synthetic
aagcacgcgttgtactggcgctggatgcgtgtg

SEQ ID NO: 5688 - DNA, 33 bp, Artificial
  Synthetic
ttactacgctccaaggttaccaagcccaacgtg

SEQ ID NO: 5689 - DNA, 33 bp, Artificial
  Synthetic
cccaccgagcaggaccatttctcactcacgtaa

SEQ ID NO: 5690 - DNA, 58 bp, Artificial
  Synthetic
ctttccctacacgacgctcttccgatctcgctagctcagtcctaggtataatgctagc

SEQ ID NO: 5691 - DNA, 59 bp, Artificial
  Synthetic
ctttccctacacgacgctcttccgatctacgctagctcagtcctaggtataatgctagc

SEQ ID NO: 5692 - DNA, 60 bp, Artificial
  Synthetic
ctttccctacacgacgctcttccgatctgacgctagctcagtcctaggtataatgctagc

SEQ ID NO: 5693 - DNA, 61 bp, Artificial
  Synthetic
ctttccctacacgacgctcttccgatcttgacgctagctcagtcctaggtataatgctagc

SEQ ID NO: 5694 - DNA, 56 bp, Artificial
  Synthetic
gactggagttcagacgtgtgctcttccgatctccacaaatcggaggcttcttcagc

SEQ ID NO: 5695 - DNA, 53 bp, Artificial
  Synthetic
gactggagttcagacgtgtgctcttccgatctcaaatcgggggcttctccagc

SEQ ID NO: 5696 - DNA, 50 bp, Artificial
  Synthetic
gactggagttcagacgtgtgctcttccgatctatcgggggctgctccagc

SEQ ID NO: 5697 - DNA, 56 bp, Artificial
  Synthetic
gactggagttcagacgtgtgctcttccgatctccacaaattgaggcccatcacagc

SEQ ID NO: 5698 - DNA, 53 bp, Artificial
  Synthetic
gactggagttcagacgtgtgctcttccgatctcaaatcgagggctgctccagc

SEQ ID NO: 5699 - DNA, 30 bp, Gaussia luciferase
tttgtcgccttcgtaggtgtggcagcgtcc

SEQ ID NO: 5700 - DNA, 30 bp, Gaussia luciferase
ccaggaatctcaggaatgtcgacgatcgcc

SEQ ID NO: 5701 - DNA, 30 bp, Gaussia luciferase
gtcgacgatcgcctcgcctatgccgccctg

SEQ ID NO: 5702 - DNA, 30 bp, Gaussia luciferase
cgatgaactgctccatgggctccaagtcct

SEQ ID NO: 5703 - DNA, 30 bp, Gaussia luciferase
tcgcgaagttgctggccacggccacgatgt

SEQ ID NO: 5704 - DNA, 30 bp, Gaussia luciferase
cagcccctggtgcagccagctttccgggca

SEQ ID NO: 5705 - DNA, 30 bp, Gaussia luciferase
ggcccccttgatcttgtccacctggccctg

SEQ ID NO: 5706 - DNA, 30 bp, Gaussia luciferase
gatgtgggacaggcagatcagacagcccct

SEQ ID NO: 5707 - DNA, 30 bp, Gaussia luciferase
cgttgcggcagccacttcttgagcaggtca

SEQ ID NO: 5708 - DNA, 30 bp, Gaussia luciferase
tgtcgacgatcgcctcgcctatgccgccct

SEQ ID NO: 5709 - DNA, 30 bp, Gaussia luciferase
ctcggccacagcgatgcagatcagggcaaa

SEQ ID NO: 5710 - DNA, 30 bp, Gaussia luciferase
ccttgaacccaggaatctcaggaatgtcga

SEQ ID NO: 5711 - DNA, 30 bp, Gaussia luciferase
ccgggcattggcttccatctctttgagcac

SEQ ID NO: 5712 - DNA, 30 bp, Gaussia luciferase
acaggcagatcagacagcccctggtgcagc

SEQ ID NO: 5713 - DNA, 30 bp, Gaussia luciferase
gtcaccaccggcccccttgatcttgtccac

SEQ ID NO: 5714 - DNA, 30 bp, Gaussia luciferase
cttgatgtgggacaggcagatcagacagcc

SEQ ID NO: 5715 - DNA, 30 bp, Gaussia luciferase
ctggccctggatcttgctggcaaaggtcgc

SEQ ID NO: 5716 - DNA, 30 bp, Gaussia luciferase
gggctccaagtccttgaacccaggaatctc

SEQ ID NO: 5717 - DNA, 30 bp, Gaussia luciferase
atgaactgctccatgggctccaagtccttg

SEQ ID NO: 5718 - DNA, 30 bp, Artificial
  Synthetic
tcgagatccgtggtcgcgaagttgctggcc

SEQ ID NO: 5719 - DNA, 30 bp, Artificial
  Synthetic
cctctgaaacgatggtgcatggtagtgacc

SEQ ID NO: 5720 - DNA, 30 bp, Artificial
  Synthetic
cctacaggttctgagtgggtgcacggccgt

SEQ ID NO: 5721 - DNA, 30 bp, Artificial
  Synthetic
gaaaatggcctataccttagggttcgcgcg

SEQ ID NO: 5722 - DNA, 30 bp, Artificial
  Synthetic
gtaatgcctggcttgtcgacgcatagtctg

SEQ ID NO: 5723 - DNA, 30 bp, Gaussia luciferase
gggcattggcttccatctctttgagcacct

SEQ ID NO: 5724 - DNA, 30 bp, Gaussia luciferase
ggaatgtcgacgatcgcctcgcctatgccg

SEQ ID NO: 5725 - DNA, 30 bp, Artificial
  Synthetic
agaggttgactgtgtagatgacatggactg

SEQ ID NO: 5726 - DNA, 30 bp, Artificial
  Synthetic
gacaggtgcagcctgtacttgtccgtcatg

SEQ ID NO: 5727 - DNA, 30 bp, Artificial
  Synthetic
aaagaggaggtcggccactgacaggtgcag

SEQ ID NO: 5728 - DNA, 30 bp, Artificial
  Synthetic
caggaagaaggacagattcctgggttccgc

SEQ ID NO: 5729 - DNA, 30 bp, Artificial
  Synthetic
cccaacatgttcagctggtccacattgaga

SEQ ID NO: 5730 - DNA, 30 bp, Artificial
  Synthetic
attgagacctcttttggtgacagaagaaaa

SEQ ID NO: 5731 - DNA, 30 bp, Artificial
  Synthetic
gcagctcctcagtcacaatcagggaagcat

SEQ ID NO: 5732 - DNA, 30 bp, Artificial
  Synthetic
cggtctcaaaggtgatcaggtgcagctcct

SEQ ID NO: 5733 - DNA, 30 bp, Artificial
  Synthetic
ctcggtctcaaaggtgatcaggtgcagctc

SEQ ID NO: 5734 - DNA, 30 bp, Artificial
  Synthetic
gcgtgcagccaggtcacacttgttccccac

SEQ ID NO: 5735 - DNA, 30 bp, Artificial
  Synthetic
gagcctgccgagattccacagtgcgtgcag

SEQ ID NO: 5736 - DNA, 30 bp, Artificial
  Synthetic
agtgcgtgcagccaggtcacacttgttccc

SEQ ID NO: 5737 - DNA, 30 bp, Artificial
  Synthetic
ctgtcttggtgctctccaccttccgcacca

SEQ ID NO: 5738 - DNA, 30 bp, Artificial
  Synthetic
gggagccgttggtgtctttgcctgcgttgg

SEQ ID NO: 5739 - DNA, 30 bp, Artificial
  Synthetic
cgtagatgctctttcctcctgtgccatctc

SEQ ID NO: 5740 - DNA, 30 bp, Artificial
  Synthetic
gaatctctttccatagaatgttctaaacca

SEQ ID NO: 5741 - DNA, 30 bp, Artificial
  Synthetic
atctctttccatagaatgttctaaaccatc

SEQ ID NO: 5742 - DNA, 30 bp, Artificial
  Synthetic
ctctttccatagaatgttctaaaccatcct

SEQ ID NO: 5743 - DNA, 30 bp, Artificial
  Synthetic
ctttccatagaatgttctaaaccatcctgc

SEQ ID NO: 5744 - DNA, 30 bp, Artificial
  Synthetic
ttccatagaatgttctaaaccatcctgcgg

SEQ ID NO: 5745 - DNA, 30 bp, Artificial
  Synthetic
ccatagaatgttctaaaccatcctgcggcc

SEQ ID NO: 5746 - DNA, 30 bp, Artificial
  Synthetic
atagaatgttctaaaccatcctgcggcctc

SEQ ID NO: 5747 - DNA, 30 bp, Artificial
  Synthetic
agaatgttctaaaccatcctgcggcctcta

SEQ ID NO: 5748 - DNA, 30 bp, Artificial
  Synthetic
aatgttctaaaccatcctgcggcctctact

SEQ ID NO: 5749 - DNA, 30 bp, Artificial
  Synthetic
tgttctaaaccatcctgcggcctctactct

SEQ ID NO: 5750 - DNA, 30 bp, Artificial
  Synthetic
ttctaaaccatcctgcggcctctactctgc

SEQ ID NO: 5751 - DNA, 30 bp, Artificial
  Synthetic
ctaaaccatcctgcggcctctactctgcat

SEQ ID NO: 5752 - DNA, 30 bp, Artificial
  Synthetic
aaaccatcctgcggcctctactctgcattc

SEQ ID NO: 5753 - DNA, 30 bp, Artificial
  Synthetic
accatcctgcggcctctactctgcattcaa

SEQ ID NO: 5754 - DNA, 30 bp, Artificial
  Synthetic
catcctgcggcctctactctgcattcaatt

SEQ ID NO: 5755 - DNA, 30 bp, Artificial; identical to SEQ ID NO: 5722
  Synthetic

SEQ ID NO: 5756 - DNA, 30 bp, Artificial
  Synthetic
tcttgatacatccagttcctttagggccat

SEQ ID NO: 5757 - DNA, 30 bp, Artificial
  Synthetic
ggtcttcaggcatggggcagcgctacctgg

SEQ ID NO: 5758 - DNA, 30 bp, Artificial
  Synthetic
tcggaaggcaaattcatagaatgcatgttc

SEQ ID NO: 5759 - DNA, 30 bp, Artificial
  Synthetic
agctgtggcagtggcaccagaatggattcc

SEQ ID NO: 5760 - DNA, 30 bp, Artificial
  Synthetic
ttcatcttgggcgtgccattgatgtgggac

SEQ ID NO: 5761 - DNA, 30 bp, Artificial
  Synthetic
gagctgtgttagtggcaccagaatggattc

SEQ ID NO: 5762 - DNA, 30 bp, Artificial
  Synthetic
gatcatattcttccacaaaatgattctgaa

SEQ ID NO: 5763 - DNA, 30 bp, Artificial
  Synthetic
gctgtgtctagaatatccaagagacaggtt

SEQ ID NO: 5764 - DNA, 30 bp, Cypridina luciferase
tttgcattcatctggtacttctagggtgtc

SEQ ID NO: 5765 - DNA, 30 bp, Artificial
  Synthetic
ttcatcatactgtcgaattctacagagccc

SEQ ID NO: 5766 - DNA, 27 bp, Artificial
  Synthetic
ttacaggtcagtatcaaaccaggccag

SEQ ID NO: 5767 - DNA, 30 bp, Artificial
  Synthetic
tttctgcagcttccgttctcagctcctcac

SEQ ID NO: 5768 - DNA, 30 bp, Artificial
  Synthetic
tactagatcgcgatttttaatctctgagcc

SEQ ID NO: 5769 - DNA, 21 bp, Gaussia luciferase
ttgtccacctggccctggatc

SEQ ID NO: 5770 - DNA, 27 bp, Artificial
  Synthetic
tcatcaacaccctgtcttgtctttgct

SEQ ID NO: 5771 - DNA, 23 bp, Cypridina luciferase
taaaccaggaaaaacatgttgcc

SEQ ID NO: 5772 - DNA, 20 bp, Cypridina luciferase
cgcccttggttccttgaccc

SEQ ID NO: 5773 - DNA, 22 bp, Artificial
  Synthetic
aggaagcaccagagccaatgga

SEQ ID NO: 5774 - DNA, 21 bp, Artificial
  Synthetic
ggggagcaggttgtctgtggt

SEQ ID NO: 5775 - DNA, 26 bp, Artificial
  Synthetic
ctgatttgatggagttggacatggcc

SEQ ID NO: 5776 - DNA, 28 bp, Artificial
  Synthetic
gtatccacatcctcttcctcaggattgc

SEQ ID NO: 5777 - DNA, 22 bp, Artificial
  Synthetic
cagagagccaggagcatcctga

SEQ ID NO: 5778 - DNA, 22 bp, Artificial
  Synthetic
tctaaagtgcggggggacatcg

SEQ ID NO: 5779 - DNA, 24 bp, Artificial
  Synthetic
ggaaagcatcctgaacatgcattc

SEQ ID NO: 5780 - DNA, 21 bp, Artificial
  Synthetic
cgactgctgctctgagccttg

SEQ ID NO: 5781 - DNA, 20 bp, Gaussia luciferase
gccaatgcccggaaagctgg

SEQ ID NO: 5782 - DNA, 25 bp, Gaussia luciferase
ggactctttgtcgccttcgtaggtg

SEQ ID NO: 5783 - DNA, 24 bp, Artificial
  Synthetic
agagaggcctgctgaaaatgactg

SEQ ID NO: 5784 - DNA, 31 bp, Artificial
  Synthetic
gagaatatccaagagacaggtttctccatca

SEQ ID NO: 5785 - DNA, 31 bp, Artificial
  Synthetic
tggacgaatatgatccaacaatagaggattc

SEQ ID NO: 5786 - DNA, 27 bp, Artificial
  Synthetic
ctcatgtactggtccctcattgcactg

SEQ ID NO: 5787 - DNA, 28 bp, Artificial
  Synthetic
ctttccctacacgacgctcttccgatct

SEQ ID NO: 5788 - DNA, 25 bp, Artificial
  Synthetic
gttcagacgtgtgctcttccgatct

SEQ ID NO: 5789 - DNA, 48 bp, Artificial
  Synthetic
tccctacacgacgctcttccgatctcgatcgggggttccggcgggtcc

SEQ ID NO: 5790 - DNA, 49 bp, Artificial
  Synthetic
tccctacacgacgctcttccgatctacgatcgggggttccggcgggtcc

SEQ ID NO: 5791 - DNA, 50 bp, Artificial
  Synthetic
tccctacacgacgctcttccgatctgacgatcgggggttccggcgggtcc

SEQ ID NO: 5792 - DNA, 51 bp, Artificial
  Synthetic
tccctacacgacgctcttccgatcttgacgatcgggggttccggcgggtcc

SEQ ID NO: 5793 - DNA, 52 bp, Artificial
  Synthetic
tccctacacgacgctcttccgatctctgacgatcgggggttccggcgggtcc

SEQ ID NO: 5794 - DNA, 53 bp, Artificial
  Synthetic
tccctacacgacgctcttccgatctactgacgatcgggggttccggcgggtcc

SEQ ID NO: 5795 - DNA, 54 bp, Artificial
  Synthetic
tccctacacgacgctcttccgatcttactgacgatcgggggttccggcgggtcc

SEQ ID NO: 5796 - DNA, 55 bp, Artificial
  Synthetic
tccctacacgacgctcttccgatctgtactgacgatcgggggttccggcgggtcc

SEQ ID NO: 5797 - DNA, 52 bp, Artificial
  Synthetic
tccctacacgacgctcttccgatctccgggaaccaaatgcattaacggcgaa

SEQ ID NO: 5798 - DNA, 52 bp, Artificial
  Synthetic
tccctacacgacgctcttccgatctaccgggaaccaaatgcattaacggcga

SEQ ID NO: 5799 - DNA, 54 bp, Artificial
  Synthetic
tccctacacgacgctcttccgatctgaccgggaaccaaatgcattaacggcgaa

SEQ ID NO: 5800 - DNA, 55 bp, Artificial
  Synthetic
tccctacacgacgctcttccgatcttgaccgggaaccaaatgcattaacggcgaa

SEQ ID NO: 5801 - DNA, 56 bp, Artificial
  Synthetic
tccctacacgacgctcttccgatctctgaccgggaaccaaatgcattaacggcgaa

SEQ ID NO: 5802 - DNA, 57 bp, Artificial
  Synthetic
tccctacacgacgctcttccgatctactgaccgggaaccaaatgcattaacggcgaa

SEQ ID NO: 5803 - DNA, 58 bp, Artificial
  Synthetic
tccctacacgacgctcttccgatcttactgaccgggaaccaaatgcattaacggcgaa

SEQ ID NO: 5804 - DNA, 59 bp, Artificial
  Synthetic
tccctacacgacgctcttccgatctgtactgaccgggaaccaaatgcattaacggcgaa

SEQ ID NO: 5805 - DNA, 53 bp, Artificial
  Synthetic
tccctacacgacgctcttccgatctccaattccacctgtacatctccacatca

SEQ ID NO: 5806 - DNA, 54 bp, Artificial
  Synthetic
tccctacacgacgctcttccgatctaccaattccacctgtacatctccacatca

SEQ ID NO: 5807 - DNA, 55 bp, Artificial
  Synthetic
tccctacacgacgctcttccgatctgaccaattccacctgtacatctccacatca

SEQ ID NO: 5808 - DNA, 56 bp, Artificial
  Synthetic
tccctacacgacgctcttccgatcttgaccaattccacctgtacatctccacatca

SEQ ID NO: 5809 - DNA, 57 bp, Artificial
  Synthetic
tccctacacgacgctcttccgatctctgaccaattccacctgtacatctccacatca

SEQ ID NO: 5810 - DNA, 58 bp, Artificial
  Synthetic
tccctacacgacgctcttccgatctactgaccaattccacctgtacatctccacatca

SEQ ID NO: 5811 - DNA, 59 bp, Artificial
  Synthetic
tccctacacgacgctcttccgatcttactgaccaattccacctgtacatctccacatca

SEQ ID NO: 5812 - DNA, 60 bp, Artificial
  Synthetic
tccctacacgacgctcttccgatctgtactgaccaattccacctgtacatctccacatca

SEQ ID NO: 5813 - DNA, 53 bp, Artificial
  Synthetic
tccctacacgacgctcttccgatctccagggcgaaagattactaacgatgagc

SEQ ID NO: 5814 - DNA, 54 bp, Artificial
  Synthetic
tccctacacgacgctcttccgatctaccagggcgaaagattactaacgatgagc

SEQ ID NO: 5815 - DNA, 55 bp, Artificial
  Synthetic
tccctacacgacgctcttccgatctgaccagggcgaaagattactaacgatgagc

SEQ ID NO: 5816 - DNA, 56 bp, Artificial
  Synthetic
tccctacacgacgctcttccgatcttgaccagggcgaaagattactaacgatgagc

SEQ ID NO: 5817 - DNA, 57 bp, Artificial
  Synthetic
tccctacacgacgctcttccgatctctgaccagggcgaaagattactaacgatgagc

SEQ ID NO: 5818 - DNA, 58 bp, Artificial
  Synthetic
tccctacacgacgctcttccgatctactgaccagggcgaaagattactaacgatgagc

SEQ ID NO: 5819 - DNA, 59 bp, Artificial
  Synthetic
tccctacacgacgctcttccgatcttactgaccagggcgaaagattactaacgatgagc

SEQ ID NO: 5820 - DNA, 60 bp, Artificial
  Synthetic
tccctacacgacgctcttccgatctgtactgaccagggcgaaagattactaacgatgagc

SEQ ID NO: 5821 - DNA, 53 bp, Artificial
  Synthetic
tccctacacgacgctcttccgatctccccccgttgtacactcttaacaaacca

SEQ ID NO: 5822 - DNA, 54 bp, Artificial
  Synthetic
tccctacacgacgctcttccgatctaccccccgttgtacactcttaacaaacca

SEQ ID NO: 5823 - DNA, 55 bp, Artificial
  Synthetic
tccctacacgacgctcttccgatctgaccccccgttgtacactcttaacaaacca

SEQ ID NO: 5824 - DNA, 56 bp, Artificial
  Synthetic
tccctacacgacgctcttccgatcttgaccccccgttgtacactcttaacaaacca

SEQ ID NO: 5825 - DNA, 57 bp, Artificial
  Synthetic
tccctacacgacgctcttccgatctctgaccccccgttgtacactcttaacaaacca

SEQ ID NO: 5826 - DNA, 58 bp, Artificial
  Synthetic
tccctacacgacgctcttccgatctactgaccccccgttgtacactcttaacaaacca

SEQ ID NO: 5827 - DNA, 59 bp, Artificial
  Synthetic
tccctacacgacgctcttccgatcttactgaccccccgttgtacactcttaacaaacca

SEQ ID NO: 5828 - DNA, 60 bp, Artificial
  Synthetic
tccctacacgacgctcttccgatctgtactgaccccccgttgtacactcttaacaaacca

SEQ ID NO: 5829 - DNA, 53 bp, Artificial
  Synthetic
tccctacacgacgctcttccgatctcaagcacgccttatactgcagatggatg

SEQ ID NO: 5830 - DNA, 54 bp, Artificial
  Synthetic
tccctacacgacgctcttccgatctacaagcacgccttatactgcagatggatg

SEQ ID NO: 5831 - DNA, 55 bp, Artificial
  Synthetic
tccctacacgacgctcttccgatctgacaagcacgccttatactgcagatggatg

SEQ ID NO: 5832 - DNA, 55 bp, Artificial
  Synthetic
tccctacacgacgctcttccgatcttgacaagcacgccttatactgcagatggat

SEQ ID NO: 5833 - DNA, 57 bp, Artificial
  Synthetic
tccctacacgacgctcttccgatctctgacaagcacgccttatactgcagatggatg

SEQ ID NO: 5834 - DNA, 58 bp, Artificial
  Synthetic
tccctacacgacgctcttccgatctactgacaagcacgccttatactgcagatggatg

SEQ ID NO: 5835 - DNA, 59 bp, Artificial
  Synthetic
tccctacacgacgctcttccgatcttactgacaagcacgccttatactgcagatggatg

SEQ ID NO: 5836 - DNA, 60 bp, Artificial
  Synthetic
tccctacacgacgctcttccgatctgtactgacaagcacgccttatactgcagatggatg

SEQ ID NO: 5837 - DNA, 52 bp, Artificial
  Synthetic
agttcagacgtgtgctcttccgatctccgttcagtgctagtcccctgtcact

SEQ ID NO: 5838 - DNA, 53 bp, Artificial
  Synthetic
agttcagacgtgtgctcttccgatctaccgttcagtgctagtcccctgtcact

SEQ ID NO: 5839 - DNA, 54 bp, Artificial
  Synthetic
agttcagacgtgtgctcttccgatctgaccgttcagtgctagtcccctgtcact

SEQ ID NO: 5840 - DNA, 55 bp, Artificial
  Synthetic
agttcagacgtgtgctcttccgatcttgaccgttcagtgctagtcccctgtcact

SEQ ID NO: 5841 - DNA, 47 bp, Artificial
  Synthetic
agttcagacgtgtgctcttccgatctcatacgggcgtcaccacacgg

SEQ ID NO: 5842 - DNA, 48 bp, Artificial
  Synthetic
agttcagacgtgtgctcttccgatctacatacgggcgtcaccacacgg

SEQ ID NO: 5843 - DNA, 49 bp, Artificial
  Synthetic
agttcagacgtgtgctcttccgatctgacatacgggcgtcaccacacgg

SEQ ID NO: 5844 - DNA, 50 bp, Artificial
  Synthetic
agttcagacgtgtgctcttccgatcttgacatacgggcgtcaccacacgg

SEQ ID NO: 5845 - DNA, 48 bp, Artificial
  Synthetic
agttcagacgtgtgctcttccgatctcccacctcgcgatcttgtcgga

SEQ ID NO: 5846 - DNA, 49 bp, Artificial
  Synthetic
agttcagacgtgtgctcttccgatctacccacctcgcgatcttgtcgga

SEQ ID NO: 5847 - DNA, 50 bp, Artificial
  Synthetic
agttcagacgtgtgctcttccgatctgacccacctcgcgatcttgtcgga

SEQ ID NO: 5848 - DNA, 51 bp, Artificial
  Synthetic
agttcagacgtgtgctcttccgatcttgacccacctcgcgatcttgtcgga

SEQ ID NO: 5849 - DNA, 50 bp, Artificial
  Synthetic
agttcagacgtgtgctcttccgatctccttgcctcggcattggaaatccc

SEQ ID NO: 5850 - DNA, 51 bp, Artificial
  Synthetic
agttcagacgtgtgctcttccgatctaccttgcctcggcattggaaatccc

SEQ ID NO: 5851 - DNA, 52 bp, Artificial
  Synthetic
agttcagacgtgtgctcttccgatctgaccttgcctcggcattggaaatccc

SEQ ID NO: 5852 - DNA, 53 bp, Artificial
  Synthetic
agttcagacgtgtgctcttccgatcttgaccttgcctcggcattggaaatccc

SEQ ID NO: 5853 - DNA, 56 bp, Artificial
  Synthetic
agttcagacgtgtgctcttccgatctcctaagcagatgggatggtactttaccgtg

SEQ ID NO: 5854 - DNA, 57 bp, Artificial
  Synthetic
agttcagacgtgtgctcttccgatctacctaagcagatgggatggtactttaccgtg

SEQ ID NO: 5855 - DNA, 58 bp, Artificial
  Synthetic
agttcagacgtgtgctcttccgatctgacctaagcagatgggatggtactttaccgtg

SEQ ID NO: 5856 - DNA, 59 bp, Artificial
  Synthetic
agttcagacgtgtgctcttccgatcttgacctaagcagatgggatggtactttaccgtg

SEQ ID NO: 5857 - DNA, 51 bp, Artificial
  Synthetic
agttcagacgtgtgctcttccgatctcattcgccacgtgagtctaggatcc

SEQ ID NO: 5858 - DNA, 52 bp, Artificial
  Synthetic
agttcagacgtgtgctcttccgatctacattcgccacgtgagtctaggatcc

SEQ ID NO: 5859 - DNA, 53 bp, Artificial
  Synthetic
agttcagacgtgtgctcttccgatctgacattcgccacgtgagtctaggatcc

SEQ ID NO: 5860 - DNA, 54 bp, Artificial
  Synthetic
agttcagacgtgtgctcttccgatcttgacattcgccacgtgagtctaggatcc

SEQ ID NO: 5861 - DNA, 36 bp, Riemerella anatipestifer; identical to SEQ ID NO: 5266

SEQ ID NO: 5862 - DNA, 36 bp, Prevotella sp.; identical to SEQ ID NO: 5267

SEQ ID NO: 5863 - DNA, 36 bp, Artificial; identical to SEQ ID NO: 5268
  Synthetic

SEQ ID NO: 5864 - DNA, 36 bp, Artificial; identical to SEQ ID NO: 5269
  Synthetic

SEQ ID NO: 5865 - DNA, 36 bp, Artificial; identical to SEQ ID NO: 5270
  Synthetic

SEQ ID NO: 5866 - DNA, 36 bp, Artificial; identical to SEQ ID NO: 5271
  Synthetic

SEQ ID NO: 5867 - DNA, 36 bp, Artificial; identical to SEQ ID NO: 5272
  Synthetic

SEQ ID NO: 5868 - protein, 1095 aa, Artificial; identical to SEQ ID NO: 5273
  Synthetic

SEQ ID NO: 5869 - protein, 1090 aa, Artificial; identical to SEQ ID NO: 5274
  Synthetic

SEQ ID NO: 5870 - protein, 804 aa, Artificial; identical to SEQ ID NO: 5275
  Synthetic

SEQ ID NO: 5871 - protein, 802 aa, Artificial; identical to SEQ ID NO: 4714
  Synthetic

SEQ ID NO: 5872 - protein, 775 aa, Artificial; identical to SEQ ID NO: 5277
  Synthetic

SEQ ID NO: 5873 - protein, 799 aa, Artificial; identical to SEQ ID NO: 4763
  Synthetic

SEQ ID NO: 5874 - protein, 873 aa, Artificial; identical to SEQ ID NO: 4663
  Synthetic

SEQ ID NO: 5875 - DNA, 84 bp, Artificial; identical to SEQ ID NO: 5280
  Synthetic

SEQ ID NO: 5876 - DNA, 40 bp, Artificial; identical to SEQ ID NO: 5281
  Synthetic

SEQ ID NO: 5877 - DNA, 84 bp, Artificial; identical to SEQ ID NO: 5282
  Synthetic

SEQ ID NO: 5878 - DNA, 40 bp, Artificial; identical to SEQ ID NO: 5283
  Synthetic

SEQ ID NO: 5879 - DNA, 84 bp, Artificial; identical to SEQ ID NO: 5284
  Synthetic

SEQ ID NO: 5880 - DNA, 40 bp, Artificial; identical to SEQ ID NO: 5285
  Synthetic

SEQ ID NO: 5881 - DNA, 84 bp, Artificial; identical to SEQ ID NO: 5286
  Synthetic

SEQ ID NO: 5882 - DNA, 40 bp, Artificial; identical to SEQ ID NO: 5287
  Synthetic

SEQ ID NO: 5883 - DNA, 84 bp, Artificial; identical to SEQ ID NO: 5288
  Synthetic

SEQ ID NO: 5884 - DNA, 40 bp, Artificial; identical to SEQ ID NO: 5289
  Synthetic

SEQ ID NO: 5885 - DNA, 43 bp, Artificial; identical to SEQ ID NO: 5290
  Synthetic

SEQ ID NO: 5886 - DNA, 40 bp, Artificial; identical to SEQ ID NO: 5291
  Synthetic

SEQ ID NO: 5887 - DNA, 40 bp, Artificial; identical to SEQ ID NO: 5291
  Synthetic

SEQ ID NO: 5888 - DNA, 40 bp, Artificial; identical to SEQ ID NO: 5291
  Synthetic

SEQ ID NO: 5889 - DNA, 40 bp, Artificial; identical to SEQ ID NO: 5294
  Synthetic

SEQ ID NO: 5890 - DNA, 40 bp, Artificial; identical to SEQ ID NO: 5295
  Synthetic

SEQ ID NO: 5891 - DNA, 30 bp, Artificial; identical to SEQ ID NO: 5296
  Synthetic

SEQ ID NO: 5892 - DNA, 127 bp, Artificial; identical to SEQ ID NO: 5297
  Synthetic

SEQ ID NO: 5893 - DNA, 127 bp, Artificial; identical to SEQ ID NO: 5298
  Synthetic

SEQ ID NO: 5894 - DNA, 127 bp, Artificial; identical to SEQ ID NO: 5299
  Synthetic

SEQ ID NO: 5895 - DNA, 111 bp, Artificial; identical to SEQ ID NO: 5300
  Synthetic

SEQ ID NO: 5896 - DNA, 31 bp, Artificial; identical to SEQ ID NO: 5301
  Synthetic

SEQ ID NO: 5897 - DNA, 31 bp, Artificial; identical to SEQ ID NO: 5302
  Synthetic

SEQ ID NO: 5898 - DNA, 31 bp, Artificial; identical to SEQ ID NO: 5303
  Synthetic

SEQ ID NO: 5899 - DNA, 31 bp, Artificial; identical to SEQ ID NO: 5304
  Synthetic

SEQ ID NO: 5900 - DNA, 43 bp, Artificial; identical to SEQ ID NO: 5305
  Synthetic

SEQ ID NO: 5901 - DNA, 111 bp, Artificial; identical to SEQ ID NO: 5306
  Synthetic

SEQ ID NO: 5902 - DNA, 31 bp, Artificial; identical to SEQ ID NO: 5307
  Synthetic

SEQ ID NO: 5903 - DNA, 31 bp, Artificial; identical to SEQ ID NO: 5308
  Synthetic

SEQ ID NO: 5904 - DNA, 31 bp, Artificial; identical to SEQ ID NO: 5309
  Synthetic

SEQ ID NO: 5905 - DNA, 31 bp, Artificial; identical to SEQ ID NO: 5310
  Synthetic

SEQ ID NO: 5906 - DNA, 43 bp, Artificial; identical to SEQ ID NO: 5311
  Synthetic

SEQ ID NO: 5907 - DNA, 114 bp, Artificial; identical to SEQ ID NO: 5312
  Synthetic

SEQ ID NO: 5908 - DNA, 30 bp, Artificial; identical to SEQ ID NO: 5313
  Synthetic

SEQ ID NO: 5909 - DNA, 25 bp, Artificial
  Synthetic
gggtttaaacgggccctctagactc

SEQ ID NO: 5910 - DNA, 25 bp, Artificial
  Synthetic
ccagatcgggggttccggcgggtcc

SEQ ID NO: 5911 - DNA, 59 bp, Artificial; identical to SEQ ID NO: 5316
  Synthetic

SEQ ID NO: 5912 - DNA, 45 bp, Artificial; identical to SEQ ID NO: 5317
  Synthetic

SEQ ID NO: 5913 - DNA, 20 bp, Artificial
  Synthetic
ttagttttgctggccgcatc

SEQ ID NO: 5914 - DNA, 21 bp, Artificial
  Synthetic
aatgtctgcctattctgctat

SEQ ID NO: 5915 - DNA, 21 bp, Artificial
  Synthetic
atagcagaataggcagacatt

SEQ ID NO: 5916 - DNA, 40 bp, Artificial; identical to SEQ ID NO: 5321
  Synthetic

SEQ ID NO: 5917 - DNA, 41 bp, Artificial; identical to SEQ ID NO: 5322
  Synthetic

SEQ ID NO: 5918 - DNA, 31 bp, Artificial; identical to SEQ ID NO: 5323
  Synthetic

SEQ ID NO: 5919 - DNA, 31 bp, Artificial; identical to SEQ ID NO: 5324
  Synthetic

SEQ ID NO: 5920 - DNA, 25 bp, Artificial
  Synthetic
aactgtgggaatactcaggtatcgt

SEQ ID NO: 5921 - DNA, 30 bp, Artificial; identical to SEQ ID NO: 5326
  Synthetic

SEQ ID NO: 5922 - DNA, 25 bp, Artificial
  Synthetic
ccagatcgggggttccggcgggtcc

SEQ ID NO: 5923 - DNA, 23 bp, Artificial
  Synthetic
gaacaaaagctggagctccaccg

SEQ ID NO: 5924 - DNA, 31 bp, Artificial; identical to SEQ ID NO: 5329
  Synthetic

SEQ ID NO: 5925 - DNA, 31 bp, Artificial; identical to SEQ ID NO: 5330
  Synthetic

SEQ ID NO: 5926 - DNA, 34 bp, Artificial; identical to SEQ ID NO: 5331
  Synthetic

SEQ ID NO: 5927 - DNA, 58 bp, Artificial; identical to SEQ ID NO: 5690
  Synthetic

SEQ ID NO: 5928 - DNA, 48 bp, Artificial
  Synthetic
ctttccctacacgacgctcttccgatctacgctagctcagtcctaggt

SEQ ID NO: 5929 - DNA, 60 bp, Artificial; identical to SEQ ID NO: 5692
  Synthetic

SEQ ID NO: 5930 - DNA, 61 bp, Artificial; identical to SEQ ID NO: 5693
  Synthetic

SEQ ID NO: 5931 - DNA, 56 bp, Artificial; identical to SEQ ID NO: 5694
  Synthetic

SEQ ID NO: 5932 - DNA, 53 bp, Artificial; identical to SEQ ID NO: 5695
  Synthetic

SEQ ID NO: 5933 - DNA, 50 bp, Artificial; identical to SEQ ID NO: 5696
  Synthetic

SEQ ID NO: 5934 - DNA, 56 bp, Artificial; identical to SEQ ID NO: 5697
  Synthetic

SEQ ID NO: 5935 - DNA, 53 bp, Artificial; identical to SEQ ID NO: 5698
  Synthetic

SEQ ID NO: 5936 - DNA, 30 bp, Gaussia luciferase; identical to SEQ ID NO: 5699

SEQ ID NO: 5937 - DNA, 30 bp, Gaussia luciferase; identical to SEQ ID NO: 5700

SEQ ID NO: 5938 - DNA, 30 bp, Gaussia luciferase; identical to SEQ ID NO: 5701

SEQ ID NO: 5939 - DNA, 30 bp, Gaussia luciferase; identical to SEQ ID NO: 5702

SEQ ID NO: 5940 - DNA, 30 bp, Gaussia luciferase; identical to SEQ ID NO: 5703

SEQ ID NO: 5941 - DNA, 30 bp, Gaussia luciferase; identical to SEQ ID NO: 5704

SEQ ID NO: 5942 - DNA, 30 bp, Gaussia luciferase; identical to SEQ ID NO: 5705

SEQ ID NO: 5943 - DNA, 30 bp, Gaussia luciferase; identical to SEQ ID NO: 5706

SEQ ID NO: 5944 - DNA, 30 bp, Gaussia luciferase; identical to SEQ ID NO: 5707

SEQ ID NO: 5945 - DNA, 30 bp, Gaussia luciferase; identical to SEQ ID NO: 5708

SEQ ID NO: 5946 - DNA, 30 bp, Gaussia luciferase; identical to SEQ ID NO: 5709

SEQ ID NO: 5947 - DNA, 30 bp, Gaussia luciferase; identical to SEQ ID NO: 5710

SEQ ID NO: 5948 - DNA, 30 bp, Gaussia luciferase; identical to SEQ ID NO: 5711

SEQ ID NO: 5949 - DNA, 30 bp, Gaussia luciferase; identical to SEQ ID NO: 5712

SEQ ID NO: 5950 - DNA, 30 bp, Gaussia luciferase; identical to SEQ ID NO: 5713

SEQ ID NO: 5951 - DNA, 30 bp, Gaussia luciferase; identical to SEQ ID NO: 5714

SEQ ID NO: 5952 - DNA, 30 bp, Gaussia luciferase; identical to SEQ ID NO: 5715

SEQ ID NO: 5953 - DNA, 30 bp, Gaussia luciferase; identical to SEQ ID NO: 5716

SEQ ID NO: 5954 - DNA, 30 bp, Gaussia luciferase; identical to SEQ ID NO: 5717

SEQ ID NO: 5955 - DNA, 30 bp, Gaussia luciferase; identical to SEQ ID NO: 5718

SEQ ID NO: 5956 - DNA, 30 bp, Gaussia luciferase; identical to SEQ ID NO: 5719

SEQ ID NO: 5957 - DNA, 30 bp, Gaussia luciferase; identical to SEQ ID NO: 5720

SEQ ID NO: 5958 - DNA, 30 bp, Gaussia luciferase; identical to SEQ ID NO: 5721

SEQ ID NO: 5959 - DNA, 30 bp, Gaussia luciferase; identical to SEQ ID NO: 5722

SEQ ID NO: 5960 - DNA, 30 bp, Gaussia luciferase; identical to SEQ ID NO: 5723

SEQ ID NO: 5961 - DNA, 30 bp, Gaussia luciferase; identical to SEQ ID NO: 5724

SEQ ID NO: 5962 - DNA, 30 bp, Artificial; identical to SEQ ID NO: 5725
  Synthetic

SEQ ID NO: 5963 - DNA, 30 bp, Artificial; identical to SEQ ID NO: 5726
  Synthetic

SEQ ID NO: 5964 - DNA, 30 bp, Artificial; identical to SEQ ID NO: 5727
  Synthetic

SEQ ID NO: 5965 - DNA, 30 bp, Artificial; identical to SEQ ID NO: 5728
  Synthetic

SEQ ID NO: 5966 - DNA, 30 bp, Artificial; identical to SEQ ID NO: 5729
  Synthetic

SEQ ID NO: 5967 - DNA, 30 bp, Artificial; identical to SEQ ID NO: 5730
  Synthetic

SEQ ID NO: 5968 - DNA, 30 bp, Artificial; identical to SEQ ID NO: 5731
  Synthetic

SEQ ID NO: 5969 - DNA, 30 bp, Artificial; identical to SEQ ID NO: 5732
  Synthetic

SEQ ID NO: 5970 - DNA, 30 bp, Artificial; identical to SEQ ID NO: 5733
  Synthetic

SEQ ID NO: 5971 - DNA, 30 bp, Artificial; identical to SEQ ID NO: 5734
  Synthetic

SEQ ID NO: 5972 - DNA, 30 bp, Artificial; identical to SEQ ID NO: 5735
  Synthetic

SEQ ID NO: 5973 - DNA, 30 bp, Artificial; identical to SEQ ID NO: 5736
  Synthetic

SEQ ID NO: 5974 - DNA, 30 bp, Artificial; identical to SEQ ID NO: 5737
  Synthetic

SEQ ID NO: 5975 - DNA, 30 bp, Artificial; identical to SEQ ID NO: 5738
  Synthetic

SEQ ID NO: 5976 - DNA, 30 bp, Artificial; identical to SEQ ID NO: 5739
  Synthetic

SEQ ID NO: 5977 - DNA, 30 bp, Artificial; identical to SEQ ID NO: 5740
  Synthetic

SEQ ID NO: 5978 - DNA, 30 bp, Artificial; identical to SEQ ID NO: 5741
  Synthetic

SEQ ID NO: 5979 - DNA, 30 bp, Artificial; identical to SEQ ID NO: 5742
  Synthetic

SEQ ID NO: 5980 - DNA, 30 bp, Artificial; identical to SEQ ID NO: 5743
  Synthetic

SEQ ID NO: 5981 - DNA, 30 bp, Artificial; identical to SEQ ID NO: 5744
  Synthetic

SEQ ID NO: 5982 - DNA, 30 bp, Artificial; identical to SEQ ID NO: 5745
  Synthetic

SEQ ID NO: 5983 - DNA, 30 bp, Artificial; identical to SEQ ID NO: 5746
  Synthetic

SEQ ID NO: 5984 - DNA, 30 bp, Artificial; identical to SEQ ID NO: 5747
  Synthetic

SEQ ID NO: 5985 - DNA, 30 bp, Artificial; identical to SEQ ID NO: 5748
  Synthetic

SEQ ID NO: 5986 - DNA, 30 bp, Artificial; identical to SEQ ID NO: 5749
  Synthetic

SEQ ID NO: 5987 - DNA, 30 bp, Artificial; identical to SEQ ID NO: 5750
  Synthetic

SEQ ID NO: 5988 - DNA, 30 bp, Artificial; identical to SEQ ID NO: 5751
  Synthetic

SEQ ID NO: 5989 - DNA, 30 bp, Artificial; identical to SEQ ID NO: 5752
  Synthetic

SEQ ID NO: 5990 - DNA, 30 bp, Artificial; identical to SEQ ID NO: 5753
  Synthetic

SEQ ID NO: 5991 - DNA, 30 bp, Artificial; identical to SEQ ID NO: 5754
  Synthetic

SEQ ID NO: 5992 - DNA, 30 bp, Artificial; identical to SEQ ID NO: 5722
  Synthetic

SEQ ID NO: 5993 - DNA, 30 bp, Artificial; identical to SEQ ID NO: 5756
  Synthetic

SEQ ID NO: 5994 - DNA, 30 bp, Artificial; identical to SEQ ID NO: 5757
  Synthetic

SEQ ID NO: 5995 - DNA, 30 bp, Artificial; identical to SEQ ID NO: 5758
  Synthetic

SEQ ID NO: 5996 - DNA, 30 bp, Artificial; identical to SEQ ID NO: 5759
  Synthetic

SEQ ID NO: 5997 - DNA, 30 bp, Artificial; identical to SEQ ID NO: 5760
  Synthetic

SEQ ID NO: 5998 - DNA, 30 bp, Artificial; identical to SEQ ID NO: 5761
  Synthetic

SEQ ID NO: 5999 - DNA, 30 bp, Artificial; identical to SEQ ID NO: 5762
  Synthetic

SEQ ID NO: 6000 - DNA, 30 bp, Artificial; identical to SEQ ID NO: 5763
  Synthetic

SEQ ID NO: 6001 - DNA, 30 bp, Cypridina luciferase; identical to SEQ ID NO: 5764

SEQ ID NO: 6002 - DNA, 30 bp, Artificial; identical to SEQ ID NO: 5765
  Synthetic

SEQ ID NO: 6003 - DNA, 27 bp, Artificial
  Synthetic
ttacaggtcagtatcaaaccaggccag

SEQ ID NO: 6004 - DNA, 30 bp, Artificial; identical to SEQ ID NO: 5767
  Synthetic

SEQ ID NO: 6005 - DNA, 30 bp, Artificial; identical to SEQ ID NO: 5768
  Synthetic

SEQ ID NO: 6006 - DNA, 21 bp, Artificial
  Synthetic
ttgtccacctggccctggatc

SEQ ID NO: 6007 - DNA, 27 bp, Artificial
  Synthetic
tcatcaacaccctgtcttgtctttgct

SEQ ID NO: 6008 - DNA, 23 bp, Cypridina luciferase
taaaccaggaaaaacatgttgcc

SEQ ID NO: 6009 - DNA, 20 bp, Cypridina luciferase
cgcccttggttccttgaccc

SEQ ID NO: 6010 - DNA, 22 bp, Artificial
  Synthetic
aggaagcaccagagccaatgga

SEQ ID NO: 6011 - DNA, 21 bp, Artificial
  Synthetic
ggggagcaggttgtctgtggt

SEQ ID NO: 6012 - DNA, 26 bp, Artificial
  Synthetic
ctgatttgatggagttggacatggcc

SEQ ID NO: 6013 - DNA, 28 bp, Artificial
  Synthetic
gtatccacatcctcttcctcaggattgc

SEQ ID NO: 6014 - DNA, 22 bp, Artificial
  Synthetic
cagagagccaggagcatcctga

SEQ ID NO: 6015 - DNA, 22 bp, Artificial
  Synthetic
tctaaagtgcggggggacatcg

SEQ ID NO: 6016 - DNA, 24 bp, Artificial
  Synthetic
ggaaagcatcctgaacatgcattc

SEQ ID NO: 6017 - DNA, 21 bp, Artificial
  Synthetic
cgactgctgctctgagccttg

SEQ ID NO: 6018 - DNA, 20 bp, Gaussia luciferase
gccaatgcccggaaagctgg

SEQ ID NO: 6019 - DNA, 25 bp, Gaussia luciferase
ggactctttgtcgccttcgtaggtg

SEQ ID NO: 6020 - DNA, 24 bp, Artificial
  Synthetic
agagaggcctgctgaaaatgactg

SEQ ID NO: 6021 - DNA, 31 bp, Artificial; identical to SEQ ID NO: 5784
  Synthetic

SEQ ID NO: 6022 - DNA, 31 bp, Artificial; identical to SEQ ID NO: 5785
  Synthetic

SEQ ID NO: 6023 - DNA, 27 bp, Artificial
  Synthetic
ctcatgtactggtccctcattgcactg

SEQ ID NO: 6024 - DNA, 28 bp, Artificial
  Synthetic
ctttccctacacgacgctcttccgatct

SEQ ID NO: 6025 - DNA, 25 bp, Artificial
  Synthetic
gttcagacgtgtgctcttccgatct

SEQ ID NO: 6026 - protein, 1271 aa, Artificial
  Synthetic
  misc_feature (9)..(14): Xaa can be any naturally occurring amino acid
  misc_feature (17)..(17): Xaa can be any naturally occurring amino acid
  misc_feature (26)..(27): Xaa can be any naturally occurring amino acid
  misc_feature (32)..(32): Xaa can be any naturally occurring amino acid
  misc_feature (37)..(37): Xaa can be any naturally occurring amino acid
  misc_feature (39)..(39): Xaa can be any naturally occurring amino acid
  misc_feature (42)..(42): Xaa can be any naturally occurring amino acid
  misc_feature (45)..(45): Xaa can be any naturally occurring amino acid
  misc_feature (63)..(64): Xaa can be any naturally occurring amino acid
  misc_feature (70)..(70): Xaa can be any naturally occurring amino acid
  misc_feature (77)..(77): Xaa can be any naturally occurring amino acid
  misc_feature (80)..(81): Xaa can be any naturally occurring amino acid
  misc_feature (85)..(85): Xaa can be any naturally occurring amino acid
  misc_feature (88)..(93): Xaa can be any naturally occurring amino acid
  misc_feature (96)..(98): Xaa can be any naturally occurring amino acid
  misc_feature (105)..(105): Xaa can be any naturally occurring amino acid
  misc_feature (116)..(117): Xaa can be any naturally occurring amino acid
  misc_feature (121)..(121): Xaa can be any naturally occurring amino acid
  misc_feature (124)..(124): Xaa can be any naturally occurring amino acid
  misc_feature (128)..(128): Xaa can be any naturally occurring amino acid
  misc_feature (130)..(131): Xaa can be any naturally occurring amino acid
  misc_feature (133)..(133): Xaa can be any naturally occurring amino acid
  misc_feature (137)..(137): Xaa can be any naturally occurring amino acid
  misc_feature (144)..(144): Xaa can be any naturally occurring amino acid
  misc_feature (147)..(148): Xaa can be any naturally occurring amino acid
  misc_feature (151)..(152): Xaa can be any naturally occurring amino acid
  misc_feature (158)..(158): Xaa can be any naturally occurring amino acid
  misc_feature (162)..(162): Xaa can be any naturally occurring amino acid
  misc_feature (171)..(173): Xaa can be any naturally occurring amino acid
  misc_feature (176)..(176): Xaa can be any naturally occurring amino acid
  misc_feature (179)..(179): Xaa can be any naturally occurring amino acid
  misc_feature (192)..(193): Xaa can be any naturally occurring amino acid
  misc_feature (195)..(196): Xaa can be any naturally occurring amino acid
  misc_feature (199)..(199): Xaa can be any naturally occurring amino acid
  misc_feature (203)..(203): Xaa can be any naturally occurring amino acid
  misc_feature (206)..(207): Xaa can be any naturally occurring amino acid
  misc_feature (209)..(209): Xaa can be any naturally occurring amino acid
  misc_feature (211)..(211): Xaa can be any naturally occurring amino acid
  misc_feature (215)..(216): Xaa can be any naturally occurring amino acid
  misc_feature (218)..(223): Xaa can be any naturally occurring amino acid
  misc_feature (225)..(226): Xaa can be any naturally occurring amino acid
  misc_feature (228)..(228): Xaa can be any naturally occurring amino acid
  misc_feature (234)..(234): Xaa can be any naturally occurring amino acid
  misc_feature (239)..(239): Xaa can be any naturally occurring amino acid
  misc_feature (245)..(245): Xaa can be any naturally occurring amino acid
  misc_feature (247)..(247): Xaa can be any naturally occurring amino acid
  misc_feature (249)..(250): Xaa can be any naturally occurring amino acid
  misc_feature (252)..(252): Xaa can be any naturally occurring amino acid
  misc_feature (254)..(255): Xaa can be any naturally occurring amino acid
  misc_feature (257)..(263): Xaa can be any naturally occurring amino acid
  misc_feature (265)..(265): Xaa can be any naturally occurring amino acid
  misc_feature (267)..(267): Xaa can be any naturally occurring amino acid
  misc_feature (292)..(294): Xaa can be any naturally occurring amino acid
  misc_feature (297)..(297): Xaa can be any naturally occurring amino acid
  misc_feature (300)..(300): Xaa can be any naturally occurring amino acid
  misc_feature (310)..(311): Xaa can be any naturally occurring amino acid
  misc_feature (315)..(315): Xaa can be any naturally occurring amino acid
  misc_feature (318)..(318): Xaa can be any naturally occurring amino acid
  misc_feature (342)..(342): Xaa can be any naturally occurring amino acid
  misc_feature (344)..(344): Xaa can be any naturally occurring amino acid
  misc_feature (347)..(347): Xaa can be any naturally occurring amino acid
  misc_feature (370)..(370): Xaa can be any naturally occurring amino acid
  misc_feature (381)..(381): Xaa can be any naturally occurring amino acid
  misc_feature (386)..(399): Xaa can be any naturally occurring amino acid
  misc_feature (401)..(401): Xaa can be any naturally occurring amino acid
  misc_feature (406)..(407): Xaa can be any naturally occurring amino acid
  misc_feature (409)..(412): Xaa can be any naturally occurring amino acid
  misc_feature (414)..(416): Xaa can be any naturally occurring amino acid
  misc_feature (421)..(421): Xaa can be any naturally occurring amino acid
  misc_feature (425)..(428): Xaa can be any naturally occurring amino acid
  misc_feature (438)..(438): Xaa can be any naturally occurring amino acid
  misc_feature (443)..(443): Xaa can be any naturally occurring amino acid
  misc_feature (446)..(449): Xaa can be any naturally occurring amino acid
  misc_feature (451)..(452): Xaa can be any naturally occurring amino acid
  misc_feature (460)..(460): Xaa can be any naturally occurring amino acid
  misc_feature (475)..(476): Xaa can be any naturally occurring amino acid
  misc_feature (481)..(482): Xaa can be any naturally occurring amino acid
  misc_feature (485)..(485): Xaa can be any naturally occurring amino acid
  misc_feature (487)..(487): Xaa can be any naturally occurring amino acid
  misc_feature (490)..(490): Xaa can be any naturally occurring amino acid
  misc_feature (492)..(501): Xaa can be any naturally occurring amino acid
  misc_feature (509)..(509): Xaa can be any naturally occurring amino acid
  misc_feature (511)..(511): Xaa can be any naturally occurring amino acid
  misc_feature (513)..(513): Xaa can be any naturally occurring amino acid
  misc_feature (517)..(517): Xaa can be any naturally occurring amino acid
  misc_feature (533)..(533): Xaa can be any naturally occurring amino acid
  misc_feature (538)..(540): Xaa can be any naturally occurring amino acid
  misc_feature (543)..(543): Xaa can be any naturally occurring amino acid
  misc_feature (547)..(547): Xaa can be any naturally occurring amino acid
  misc_feature (553)..(553): Xaa can be any naturally occurring amino acid
  misc_feature (562)..(562): Xaa can be any naturally occurring amino acid
  misc_feature (580)..(593): Xaa can be any naturally occurring amino acid
  misc_feature (595)..(599): Xaa can be any naturally occurring amino acid
  misc_feature (602)..(602): Xaa can be any naturally occurring amino acid
  misc_feature (606)..(606): Xaa can be any naturally occurring amino acid
  misc_feature (612)..(612): Xaa can be any naturally occurring amino acid
  misc_feature (614)..(614): Xaa can be any naturally occurring amino acid
  misc_feature (618)..(618): Xaa can be any naturally occurring amino acid
  misc_feature (638)..(638): Xaa can be any naturally occurring amino acid
  misc_feature (642)..(642): Xaa can be any naturally occurring amino acid
  misc_feature (646)..(646): Xaa can be any naturally occurring amino acid
  misc_feature (650)..(650): Xaa can be any naturally occurring amino acid
  misc_feature (661)..(661): Xaa can be any naturally occurring amino acid
  misc_feature (664)..(664): Xaa can be any naturally occurring amino acid
  misc_feature (668)..(672): Xaa can be any naturally occurring amino acid
  misc_feature (674)..(674): Xaa can be any naturally occurring amino acid
  misc_feature (676)..(679): Xaa can be any naturally occurring amino acid
  misc_feature (686)..(686): Xaa can be any naturally occurring amino acid
  misc_feature (690)..(690): Xaa can be any naturally occurring amino acid
  misc_feature (695)..(695): Xaa can be any naturally occurring amino acid
  misc_feature (700)..(700): Xaa can be any naturally occurring amino acid
  misc_feature (711)..(711): Xaa can be any naturally occurring amino acid
  misc_feature (713)..(713): Xaa can be any naturally occurring amino acid
  misc_feature (739)..(739): Xaa can be any naturally occurring amino acid
  misc_feature (742)..(742): Xaa can be any naturally occurring amino acid
  misc_feature (746)..(747): Xaa can be any naturally occurring amino acid
  misc_feature (750)..(750): Xaa can be any naturally occurring amino acid
  misc_feature (752)..(753): Xaa can be any naturally occurring amino acid
  misc_feature (755)..(758): Xaa can be any naturally occurring amino acid
  misc_feature (764)..(764): Xaa can be any naturally occurring amino acid
  misc_feature (767)..(767): Xaa can be any naturally occurring amino acid
  misc_feature (769)..(772): Xaa can be any naturally occurring amino acid
  misc_feature (775)..(775): Xaa can be any naturally occurring amino acid
  misc_feature (777)..(777): Xaa can be any naturally occurring amino acid
  misc_feature (783)..(786): Xaa can be any naturally occurring amino acid
  misc_feature (788)..(788): Xaa can be any naturally occurring amino acid
  misc_feature (790)..(790): Xaa can be any naturally occurring amino acid
  misc_feature (792)..(813): Xaa can be any naturally occurring amino acid
  misc_feature (830)..(831): Xaa can be any naturally occurring amino acid
  misc_feature (835)..(835): Xaa can be any naturally occurring amino acid
  misc_feature (854)..(854): Xaa can be any naturally occurring amino acid
  misc_feature (857)..(860): Xaa can be any naturally occurring amino acid
  misc_feature (864)..(864): Xaa can be any naturally occurring amino acid
  misc_feature (880)..(880): Xaa can be any naturally occurring amino acid
  misc_feature (883)..(884): Xaa can be any naturally occurring amino acid
  misc_feature (894)..(894): Xaa can be any naturally occurring amino acid
  misc_feature (897)..(897): Xaa can be any naturally occurring amino acid
  misc_feature (899)..(900): Xaa can be any naturally occurring amino acid
  misc_feature (903)..(903): Xaa can be any naturally occurring amino acid
  misc_feature (909)..(909): Xaa can be any naturally occurring amino acid
  misc_feature (914)..(914): Xaa can be any naturally occurring amino acid
  misc_feature (916)..(918): Xaa can be any naturally occurring amino acid
  misc_feature (925)..(925): Xaa can be any naturally occurring amino acid
  misc_feature (933)..(933): Xaa can be any naturally occurring amino acid
  misc_feature (944)..(944): Xaa can be any naturally occurring amino acid
  misc_feature (952)..(952): Xaa can be any naturally occurring amino acid
  misc_feature (955)..(955): Xaa can be any naturally occurring amino acid
  misc_feature (969)..(970): Xaa can be any naturally occurring amino acid
  misc_feature (972)..(974): Xaa can be any naturally occurring amino acid
  misc_feature (977)..(977): Xaa can be any naturally occurring amino acid
  misc_feature (984)..(984): Xaa can be any naturally occurring amino acid
  misc_feature (987)..(987): Xaa can be any naturally occurring amino acid
  misc_feature (993)..(993): Xaa can be any naturally occurring amino acid
  misc_feature (995)..(996): Xaa can be any naturally occurring amino acid
  misc_feature (998)..(999): Xaa can be any naturally occurring amino acid
  misc_feature (1002)..(1004): Xaa can be any naturally occurring amino acid
  misc_feature (1007)..(1008): Xaa can be any naturally occurring amino acid
  misc_feature (1012)..(1012): Xaa can be any naturally occurring amino acid
  misc_feature (1020)..(1020): Xaa can be any naturally occurring amino acid
  misc_feature (1022)..(1023): Xaa can be any naturally occurring amino acid
  misc_feature (1025)..(1025): Xaa can be any naturally occurring amino acid
  misc_feature (1041)..(1041): Xaa can be any naturally occurring amino acid
  misc_feature (1044)..(1044): Xaa can be any naturally occurring amino acid
  misc_feature (1054)..(1054): Xaa can be any naturally occurring amino acid
  misc_feature (1057)..(1057): Xaa can be any naturally occurring amino acid
  misc_feature (1072)..(1072): Xaa can be any naturally occurring amino acid
  misc_feature (1076)..(1078): Xaa can be any naturally occurring amino acid
  misc_feature (1080)..(1081): Xaa can be any naturally occurring amino acid
  misc_feature (1084)..(1084): Xaa can be any naturally occurring amino acid
  misc_feature (1087)..(1088): Xaa can be any naturally occurring amino acid
  misc_feature (1090)..(1090): Xaa can be any naturally occurring amino acid
  misc_feature (1093)..(1093): Xaa can be any naturally occurring amino acid
  misc_feature (1097)..(1098): Xaa can be any naturally occurring amino acid
  misc_feature (1100)..(1102): Xaa can be any naturally occurring amino acid
  misc_feature (1108)..(1109): Xaa can be any naturally occurring amino acid
  misc_feature (1115)..(1117): Xaa can be any naturally occurring amino acid
  misc_feature (1119)..(1120): Xaa can be any naturally occurring amino acid
  misc_feature (1122)..(1123): Xaa can be any naturally occurring amino acid
  misc_feature (1126)..(1126): Xaa can be any naturally occurring amino acid
  misc_feature (1141)..(1142): Xaa can be any naturally occurring amino acid
  misc_feature (1145)..(1146): Xaa can be any naturally occurring amino acid
  misc_feature (1150)..(1150): Xaa can be any naturally occurring amino acid
  misc_feature (1154)..(1154): Xaa can be any naturally occurring amino acid
  misc_feature (1157)..(1157): Xaa can be any naturally occurring amino acid
  misc_feature (1160)..(1160): Xaa can be any naturally occurring amino acid
  misc_feature (1189)..(1191): Xaa can be any naturally occurring amino acid
  misc_feature (1193)..(1195): Xaa can be any naturally occurring amino acid
  misc_feature (1197)..(1199): Xaa can be any naturally occurring amino acid
  misc_feature (1201)..(1204): Xaa can be any naturally occurring amino acid
  misc_feature (1210)..(1210): Xaa can be any naturally occurring amino acid
  misc_feature (1216)..(1216): Xaa can be any naturally occurring amino acid
  misc_feature (1219)..(1219): Xaa can be any naturally occurring amino acid
  misc_feature (1222)..(1222): Xaa can be any naturally occurring amino acid
  misc_feature (1224)..(1226): Xaa can be any naturally occurring amino acid
  misc_feature (1228)..(1228): Xaa can be any naturally occurring amino acid
  misc_feature (1230)..(1230): Xaa can be any naturally occurring amino acid
  misc_feature (1234)..(1235): Xaa can be any naturally occurring amino acid
  misc_feature (1238)..(1239): Xaa can be any naturally occurring amino acid
  misc_feature (1242)..(1242): Xaa can be any naturally occurring amino acid
  misc_feature (1244)..(1246): Xaa can be any naturally occurring amino acid
  misc_feature (1248)..(1250): Xaa can be any naturally occurring amino acid
  misc_feature (1252)..(1252): Xaa can be any naturally occurring amino acid
  misc_feature (1255)..(1255): Xaa can be any naturally occurring amino acid
  misc_feature (1258)..(1259): Xaa can be any naturally occurring amino acid
  misc_feature (1261)..(1261): Xaa can be any naturally occurring amino acid
  misc_feature (1263)..(1266): Xaa can be any naturally occurring amino acid
MKLTRRRIXXXXXXQKXTAAFYRDMXXGLLYXDSEDXDXTEXVVXSMDFERSWRGRILKNAEXXKNPFYXFVKGLVXSNXXIVCXPIXXXXXXDIXXXINKNLTXFGRNLKAPDSXXTLEXLIXKIQXGXXEXEIRXELEKIKXMIXXDIXXRKEQLXKSIXNNRIPFSLXXXKLXPSXKKMKWLYKLLDGXXKXXNEXMLDXYWXXYXYXKLEXXIXXXXXXLXXKXARSISXAVSKXVREYHXNXRXXYXGXXNXXXXXXXDXEXFLLFLKAVEQHFKKYYPVKSKHSNXXXDKXLCXEKNYKFYCSXXFVKXEVXRSIINQLVSGLIQQGKLLHYFYDXGXWQXDFLNSYGLSYIQVEEAFKKSLMXSLSWGINRLTXFFIDXXXXXXXXXXXXXXKXDDILXXKXXXXAXXXNYYNXLRDXXXXQKHFKEKLAXCYPVXVKXXXXRXXDDIEKLIXLVEEARESVAYLRHXXFHYKXXSLXEXLKXLXXXXXXXXXXKIDYSVAXEXFXRDIXNLYDAFREQIRSLGIXEYYPXXXISXCFKXCGLEFXLYSPQNSLXPSFKKVYKRGSNLYKAYXXXXXXXXXXXXXXNXXXXXEEXKELXWYIEVXNXDQGXLAYKNLLQLIYYHAFLPEVXENEXLITXFINXTKEWNRKEAEXAAXKKNXXXXXNXDXXXXAYRYEAXPDYXGEPLXDYFKXLQREQMARAKXVXEGEAENNNYIQFIQDVVVWAFGAYLXRLXKYRXXLQXPXXQXXXXVNDALXELXPXXXXKSXFXMKCRFXXXXIXNXGXXXXXXXXXXXXXXXXXXXXXXKRKDLLCFYLFLRLLDXXEISXLQHQFVRYRCSLKERRLPXNRXXXXEEIXLLEELEELMELVRYTXPSXXELSGKAESGXDTXIXXHFXDFFEKXVLKNXDXXXLYYQSDXKTPVPRKXMALLMRSAPLXLYKDMFKXYYXITEKECLEYIKLSXXIXXXQNXLNELHKXLEXVKLKSXKXXNXXGKXXXYLXXKDAXKVKEYEEXLXXVXRYKHLQRKLTFESLYXIFXIHVDIAARMXGYXQDWERDMFFLLKALXYNGXXXEXXVEXIFXXGXIVXKLKXXLXXXDKELLXXLCWHKXXXDXXFXXIIXIRNPIAHLNHFTQTXXNPXXSLEXMINXLRXLLXYDRKRQNAVTKTINDLLLKEYHIRIKWKXXXDXXXNXXXKXXXXENEPIXHLKHLXKGXKCXVXXXAXMXDKQXXWLXXGIXEXXXDXXXLXCIXRLXXFXYXXXXSANPK

SEQ ID NO: 6027 - protein, 1223 aa, Artificial; identical to SEQ ID NO: 334
  Synthetic

SEQ ID NO: 6028 - protein, 1259 aa, Artificial; identical to SEQ ID NO: 294
  Synthetic

SEQ ID NO: 6029 - protein, 1490 aa, Artificial
  Synthetic
MKLTRKRIGQGRNNQKVTAAFYRDMASGLLYVDSEDNDRTEEIINSMDFERSWRGRILKNAESGKNPFNMFVKGLIVANEAIVCKPVFNNDIDITKFMNKYLTDFGRNLKAPGSDITLKDIIRKMQGGAPEEEIRRELEKIKEMIGNDIRKRKEQLSESIANNRIPFSTVNNKLMPSARKMKWLYKLLDGENGAFNGQMLDEYWNKYNYRKLEAVIIEEIESLQDKNARSISKAVSRAVRDYHRNFRTDYNDTALREPDGTGHNNNDTAGNPDKEGFLLFLKAVEQHFKKYYPVKSKHSSDARDKSLCDEKNYKFYCSHDFVKNEVSRSIIGNQLVSGLIQQGKLLHYFYDGGTWQQDFLNSYGLSYIQVEEAFKKSLMSSLSWGINRLTTFFIDGITEGLGGRSNDAGLIDDILLENQKIRAFRENFYNSLRDNRSKEGKELQKRFIEKLAACYPVIVKDDGEKSGDDIEKLIGLVEEARNSVAYLRHSSFHFKKVSLPEMLKDLNDDKAYHNTGQKGHKAAKADYSIAEELFRRDIDRLYDAFREQIRSLGIVEYYPTGLISDCFKTCGMEFTLYSPQNSLIPSFKKVYKRGSNLYKAYKEKVQNVSDGQEEKNARTDQKDQEEFKELGWYIEVSNNEPGWLAYKNLLQLIYYHAFLPEVYQNEALITGFINRTKDWNRKEAEKAAAKKNDFNRNKDRAFMAYRYEAVPDYQGEPLEDYFKVLQREQMARAKEVSEGSAENNTYIQFIQDVIVWAFGAYLERLVNYREALQKPSLQEKKVNEALNELLPEKMEESQFFMVCRFNKDKINNSGEHITSAGKTQIGQRKDLLCFYLFLRLLDAREVSGLQHQFIRYRCSLKERRPDNRRDIEEEIELFEELEELMELVRYTVPSVTELLGRAGSGFDTVIQDHFREFFDNRALENDDIRKLYYQSDEKTPVPRKHMALLMRSAPLRLYKDMFRNYYLITEKECLEFIQLSRNIDSYQGRLNELHKQLEQVKVKSVKINNQKGKTYSFLEDKDAQKVAEYEDNLNTVIRYKHLQRKLTFEALYTIFRVHVDVAARMIGYAQDWERDMFFLLKSLEYNGKIRYGMVESIFSEGSIVRKLQIILSPDEKEILCMLCWHKKLSDKEFYYRIRIRNPIAHLNHFTQTSANPNGSLEAMLNDLRSLLHYDRKRQNTVTKTINDILLKDYNIRIKWKRTLSNKNNGKMEFKIVEPLENEPIAQKVAEYEDNLNTVIRYKHLQRKLTFEALYTIFRVHVDVAARMIGYAQDWERDMFFLLKSLEYNGKIRYGMVESIFSEGSIVRKLQIILSPDEKEILCMLCWHKKLSDKEFYYRIRIRNPIAHLNHFTQTSANPNGSLEAMLNDLRSLLHYDRKRQNTVTKTINDILLKDYNIRIKWKRTLSNKNNGKMEFKIVEPLENEPIVHLKHIRKEDKCRVHNKAHMLRKQEAWLHKGIIENAHDGDILRCIYRLLAFRYPPVRTYGIHKK

SEQ ID NO: 6030 - protein, 1283 aa, Artificial
  Synthetic
MIIGGINMKLTRRRISQERKNQKLTAAFYRDMDHGLLYVDSEDEDRTEYVVSSMDFERSWRGRILKNGEDNKNPFYEFVKGLVGSNEIICKPITNDNNTDINEKIKKYITEFGRNLKAPGSEVTLEKLILNIQSGTSENEVRPELEKIKDMIKKDIEKRKDELIKSITNNHIPFMLDEDKLVPSTKKMKWLYKFLNGPDKSLNLQMFDEYWTKYGYKNLEEKIIKEINSLPEKNARSISRAVSKTVREYNRNFRINYMVPENENAEADSDYEGFLLFLKAVEQHFKKYYPVKSKDSNEVRDKNLCEEKNYKFYCSYNFVKNEVKRSIINQLVSGLIQQGKLLHYFYKDGIWQQDFLNSYGLSYIQVEESFKKSLMTSLSWGINRLTSFFIDVGTDENEEKTVQNKKQKNNRKIDDILSDKSNLRAIFNDLRSNTELQKHFKEKLAFCYPIFIKVKKEKMFDDIEKLIKLVEEARESVAYLRHRCFHYKDVTITEMLKALNNNTETDKTEDIDYSVAAEYFLRDINNLYDAFREQIRSSGIADYYPADIISGCFKKCGLQFVLYSPQNSLMPSFKNIYKRGSNLYKAYQEEKEQKDKEYKRHNTNIVQEESKELSWYIEVSDTEQGKTAYRNLLQLIYYHAFLPEVRENESLITVYFAKTKEWNRKVAETKAKKKNAGKTYKDKPIRAYRYEAIPDYVGERLDDYFKILQREQMAKAKDVNEGNAENNNIQFIRDVVVWAFGAYLEERLEKYKKDLQSSHSQKDKKDVNDALKELFPDDKDKRQFFMKCKFTDVLINDVGENNQITEMEDLETSKEQQNREIKRKDLLCFYLFLRLLDEREISGLKHQFVRYRCSLKERRLPDNRKDVDEEIVLLEELEELMELVSYTMPSVPELSGKAESGLDLVISKYFKDFFEKSALKNQDIMKLYYQSDNKTPVFRKYMALLMRSAPLQLYKDMFRNYYIITEKECQEYIKTSQDIDAFQCKLNELHKELEHVRLKTVEDKKGKIFYYLAGSDAERVKEYEDTLSKVVRYKRLQHKLTFESLYTIFKIHVDIAARMVGYTEDWERDMLFLFKSLEYNEKLNEGVVEKIFNNKDEKGHIVKKLKDNLNSEDKEKIGILCWHKEITDKNFVEIIWIRNPIAHLNHFMQTVKNPKRSLEKMINALCVLLSYDRKRQNSVTKTINDLLLNEYHVKIKWKRWVDKNCNIYYYIDEQNIENEPILHIKHLHMGEKCHVNRNADMFDRQKEWLRNGITEEVYDKSMLGCICRLFKFDYNDLYGANRQ

SEQ ID NO: 6031 - protein, 1283 aa, Artificial
  Synthetic
MKLTRRRISGNSVDQKITAAFYRDMSQGLLYYDSEDNDCTDKVIESMDFERSWRGRILKNGEDDKNPFYMFVKGLVGSNDKIVCEPIDVDSDPDNLDILINKNLTGFGRNLKAPDSNDTLENLIRKIQAGIPEEEVLPELKKIKEMIQKDIVNRKEQLLKSIKNNRIPFSLEGSKLVPSTKKMKWLFKLIDVPNKTFNEKMLEKYWEIYDYDKLKANITNRLDKTDKKARSISRAVSEELREYHKNLRTNYNRFVSGDRPAAGLDNGGSAKYNPDKEEFLLFLKEVEQYFKKYFPVKSKHSNKSKDKSLVDKYKNYCSYKVVKKEVNRSIINQLVAGLIQQGKLLYYFYYNDTWQEDFLNSYGLSYIQVEEAFKKSVMTSLSWGINRLTSFFIDDSNTVKFDDITTKKAKEAIESNYFNKLRTCSRMQDHFKEKLAFFYPVYVKDKKDRPDDDIENLIVLVKNAIESVSYLRNRTFHFKESSLLELLKELDDKNSGQNKIDYSVAAEFIKRDIENLYNVFREQIRSLGIAEYYKADMISDCFKTCGLEFALYSPKNSLMPAFKNVYKRGANLNKAYIRDKGPKETGDQGQNSYKALEEYRELTWYIEVKNNDQSYNAYKNLLQLIYYHAFLPEVRENEALITDFINRTKEWNRKETEERLNTKNNKKHKNFDENDDITVNTYRYESIPDYQGESDDYLKVLQRKQMARAKEVNEKEEGNNNYIQFIRDVVVWAFGAYLENKLKNYKNELQPPLSKENIGLNDTLKELFPEEKVKSPFNIKCRFSISTFIDNKGKSTDNTSAEAVKTDGKEDEKDKKMIKRKDLLCFYLFRLLDENEICKLQHQFIKYRCSLKERRFPGNRTKLEKETELLAELEELMELVRFTMPSIPEISAKAESGYDTMIKKYFKDFIEKKVFKNPKTSNLYYHSDSKTPVTRKYMALLMRSAPLHLYKDIFKGYYLITKKECLEYIKLSNIIKDYQNSLNELHEQLERIKLKSEKQNGKDSLYLDKKDFYKVKEYVENLEQVARYKHLQHKINFESLYRIFRIHVDIAARMVGYTQDWERDMHFLFKALVYNGVLEERRFEAIFNNNDDNNDGRIVKKIQNNLNNNKNRELVSMCWNKKLNKNEFGAIIWKRNPIAHLNHFTQTEQNSKSSLESLINSLRILLAYDRKRQNAVTKTTNDLLLNDYHIRIKWEGRVDEGQIYFNIKEKEDIENEPIIHLKHLHKKDCYIYKNSYMFDKQKEWICNGIKEEVYDKSILKCIGNLFKFDYEDKNKSSANPKHT

SEQ ID NO: 6032 - DNA, 32 bp, Artificial
  Synthetic
gtaacaatccccgcatacaggggaactgaaac

SEQ ID NO: 6033 - DNA, 32 bp, Artificial; identical to SEQ ID NO: 6032
  Synthetic

SEQ ID NO: 6034 - DNA, 32 bp, Artificial; identical to SEQ ID NO: 6032
  Synthetic

SEQ ID NO: 6035 - DNA, 32 bp, Artificial; identical to SEQ ID NO: 6032
  Synthetic

SEQ ID NO: 6036 - DNA, 32 bp, Artificial; identical to SEQ ID NO: 6032
  Synthetic

SEQ ID NO: 6037 - DNA, 32 bp, Artificial; identical to SEQ ID NO: 6032
  Synthetic

SEQ ID NO: 6038 - DNA, 32 bp, Artificial; identical to SEQ ID NO: 6032
  Synthetic

SEQ ID NO: 6039 - DNA, 32 bp, Artificial; identical to SEQ ID NO: 6032
  Synthetic

SEQ ID NO: 6040 - DNA, 32 bp, Artificial; identical to SEQ ID NO: 6032
  Synthetic

SEQ ID NO: 6041 - DNA, 32 bp, Artificial; identical to SEQ ID NO: 6032
  Synthetic

SEQ ID NO: 6042 - DNA, 32 bp, Artificial; identical to SEQ ID NO: 6032
  Synthetic

SEQ ID NO: 6043 - DNA, 32 bp, Artificial; identical to SEQ ID NO: 6032
  Synthetic

SEQ ID NO: 6044 - DNA, 32 bp, Artificial; identical to SEQ ID NO: 6032
  Synthetic

SEQ ID NO: 6045 - DNA, 32 bp, Artificial; identical to SEQ ID NO: 6032
  Synthetic

SEQ ID NO: 6046 - DNA, 32 bp, Artificial; identical to SEQ ID NO: 6032
  Synthetic

SEQ ID NO: 6047 - DNA, 32 bp, Artificial; identical to SEQ ID NO: 6032
  Synthetic

SEQ ID NO: 6048 - DNA, 32 bp, Artificial; identical to SEQ ID NO: 6032
  Synthetic

SEQ ID NO: 6049 - DNA, 32 bp, Artificial
  Synthetic
gtaacaatccccgtagacaggggaactgcaac

SEQ ID NO: 6050 - DNA, 32 bp, Artificial; identical to SEQ ID NO: 6049
  Synthetic

SEQ ID NO: 6051 - DNA, 32 bp, Artificial; identical to SEQ ID NO: 6049
  Synthetic

SEQ ID NO: 6052 - DNA, 32 bp, Artificial; identical to SEQ ID NO: 6049
  Synthetic

SEQ ID NO: 6053 - DNA, 32 bp, Artificial; identical to SEQ ID NO: 6049
  Synthetic

SEQ ID NO: 6054 - DNA, 32 bp, Artificial
  Synthetic
gtaacaatccccgtatacaggggaactgcaac

SEQ ID NO: 6055 - DNA, 32 bp, Artificial
  Synthetic
  misc_feature (29)..(29): n is a, c, g, or t
gtcacaatccccgtggacaggggaactgnaac

SEQ ID NO: 6056 - DNA, 32 bp, Artificial
  Synthetic
accacaatccccgtggacaggggaactgcaac

SEQ ID NO: 6057 - DNA, 32 bp, Artificial
  Synthetic
gtcacgatccccgtagacaggggaactttaac

SEQ ID NO: 6058 - DNA, 32 bp, Artificial
  Synthetic
  misc_feature (29)..(32): n is a, c, g, or t
gtcacaatccccgtgaacaggggaactgnnnn

SEQ ID NO: 6059 - DNA, 32 bp, Artificial; identical to SEQ ID NO: 6055
  Synthetic
  misc_feature (29)..(29): n is a, c, g, or t

SEQ ID NO: 6060 - DNA, 32 bp, Artificial; identical to SEQ ID NO: 6056
  Synthetic

SEQ ID NO: 6061 - DNA, 32 bp, Artificial; identical to SEQ ID NO: 6057
  Synthetic

SEQ ID NO: 6062 - DNA, 32 bp, Artificial; identical to SEQ ID NO: 6058
  Synthetic
  misc_feature (29)..(32): n is a, c, g, or t

SEQ ID NO: 6063 - DNA, 32 bp, Artificial; identical to SEQ ID NO: 6055
  Synthetic
  misc_feature (29)..(29): n is a, c, g, or t

SEQ ID NO: 6064 - DNA, 32 bp, Artificial; identical to SEQ ID NO: 6056
  Synthetic

SEQ ID NO: 6065 - DNA, 32 bp, Artificial; identical to SEQ ID NO: 6057
  Synthetic

SEQ ID NO: 6066 - DNA, 32 bp, Artificial; identical to SEQ ID NO: 6058
  Synthetic
  misc_feature (29)..(32): n is a, c, g, or t
